United States Patent Application Publication US 2006/0154250 A1 - sequence listing, part 5

SEQ ID NO: 495 - DNA, 176594 bp, Mus musculus
  misc_feature (1)...(176594): n = A,T,C or G
gtgaagagttatattaagcagggtagcccagattgagagtgacaaataccgtgttttctataatatgcagatcctagcttccagttattggatgtgtatgtattcagatgggagtaactggaagtaaaagccacggatctatgaaggggcttgtggagcagaacggagtcttttataaaggaagggagcatgaaggccacagaacacctgcgctatgaaagtggaacaggatatggggtgggggtggggcaaggagaatgtgagggaaagtagacagagagggagggtgggcttggaaattaatctaaaggtaacatggattaaaataccataagcaaacctgttactttgtaagctaacttaactgaaagaataaacaattttttttaagaaaataaaatgttttgtatgtgcaagcatgctgatcttcttccaggcaaaggtcaagttttaaaagaaatattcaaaactttctctagaaaggaagaagagaaaaacggttggcttatgtcttctaaagtgttgcttttttaccatattttaaatattacacattgtaattttttatccattttattgtggtactaagattgacgcaagtaatcaagacatttaatcaagataataacactcaaaagaaacaagcgaaagcatgctgagtgccagggatgtagcccaagggtagagtggttgcttcatgtcttcacgtcttgggttaattatatccctagcactacttaaaaaaacaaacaaacaaacaagcaaacaaaccttaaaaagtgccttaactttttcaccacaagaatattaatgatttgttgagcactagacggtgacctaaatcaacagtagcccagagtattttactggggaaagggcttttgcaggagaaaggcagaattctgtttgccaaggaaggcagggaaagactgcacaagtcatctacccaggccccagctgtgtagctggactacagtgggggtctgaaaacagccatatataattcctaaacagataaacgtgaccagttcccactttacctacaaagccagacataggctggtccagggacccagaaagcagttaaaaaatgaagttcatcgctgcgggagtagtatggagcaggagccttacctagcctgaaggcttcattcaggtcaggaaggtgcaggcaggactggatttggaatagcactcgctgatagactgagggtgatgggaacggcctgggcacagcctcagttccatcatgcactccagagagggcggaagggaaaagtctcttggaggggaactagatggggagaagacatttctagagccctgcgactgagtagtggagatggaggttgttttagtgtatggcagaagctgagctaacagctgcctgttgtttccatcccaaagccagaaaacaagccactgtccccatctttgtcactcttaaagggaagggaattgagtttcaccaagcagtccctagtggagacagagaatgccagcttaaccttggaaggtctacatcaagttctcccttattgaggaaacggcctaatgaacttctggatgggtgaaggaaatcacaagagctttgtgtacatggcatttgtgatgatagtgagaccgtcctggtttctcccttatgcaaaccgctccacgcctagtgtgaaggagaaaggaagcagctctcagaacagtgtgtgcagtctgttcctctttacataaaagcaatgcctgtgagtgcctggacatgtatgtgcgtagaaaggactttagaagagtgtgctggggtgctaagccaaagccaagggagcaaagggtaaatagaagggcaggaggccggacgccgcattttgtagttcattcaaacttttgcacggctttttctctttacaggaatgtagttgaccaatttagcacaaaggccacacaacagaaaagccctagtcaggcgctgtgaacgacatcacctcagggcacccttcttcggctttgtggacccctctgtccttccttcctctgtccacactggttcctccttcctttgtttgcattcagagcattacccctagaatcccactacggcatctaccaaacaacactgaaagcgcggccttccaggttcatcttctctgccaagcttaaagaagaggctagaatgtgtctcgttcatctccacactgagaatcttctcaattctcgatgcataggcaacaaagaaaggatgaaaagagataacgaacatatttctgtcttcagatgagtctctctgagttctattttactaaggttctaaaataccagttcaatgacctacttaaattttgattttgaaagctaaaacagaaaaagcctcaatgaagagaggaagaaccaagcctccactgagagttagttttgacaagtaccaacacacccatgaagtctcctgccatgattaaaacggtgcaggcaggacttgaataataccaatagctaacagtcccaagcccttaaaaatccagatctatagtttatgtaacggcgacgtcttctgtataatacagactgttagctggccctaaaactgttgtttgtttgttttgttttgttttattttgttttgttttgttttgttttaattaaaaggtgtttttctgagtctaaaagcactgaagctcaactttgccaaatttcaaaagacttgaaaaacgactagggcatgtctgggataccgggttattaacagaaagtaactcggccttgacgcctaaatcccaagtggaaaacattcagaggcagaatttcaaggtaaagttcaggttggtgagtctcgagtgcacgataagcctccctcaggagtgaagcctgtgggagctgcgggtttgtgagtgtgggagtgagtgcacaggagggtctggggtgctgtgacagctgtgcccctgaccgaaggctccagaactacttctgcttctgcaggaggccacagcagctttcaggaactgagaaccgagaggaggaagtggaagctgcccggagagcagtcgggaccgctttggacccctggttcctcttggtggatgggaactgcctagcattaaccatctcagacccttggcctgaacaggacggaagggaagttctttgctggcttgccagctattactttgactcttccacttagttctcagaagcatggagaccatggaggacctcgcctatcaccaccatccccccacccccgccccaccacgcctatcacccccctgttccccattgctttaggtgtatcccaaatgtatgcatcagtaaattttctagatttcctcccagccttttcttcttacctttcccctccatcctttcttcactctttgctgacctcatacccagtctcctagggctgcgttataggtgtgtgccacggtaccagggccttagattttctttagtgaagaatctatgtgatgtatactctttcttagaaaaaaaaaaagaaatcctaacgctattaatgagacttttaagaggtggtggatttcaccgtagccaccttctagtgaaggtgcttgcatcaggccctcttggttgctactctcttaaacccgccattagacagggaggtggggtttgtagtttcaccccacccccaatttacagcactctgccccttgaaaacaaccacttctcatcattgccaagattccggatttctgtaacagtttccttgtttgattccctcatttgacatttaggtggctttaaactatctgtcaccctacagccactgggatctttgaataaacaaaccctcaaattcccaagctcctgctgcatttatctgatgccagggtcttggtcactggcatagctagctccttccatcctgtgctttgactgcctcctctcttttgtgtccttggcagaagctctcaggtggcaggcccttctgtccaggccactcttccacccaatctacctagctgtcctgcccccctttcttttagacttacatacttctcccttggagaagtttttctatgagcctcccctccccaactcactcagtgtcttatgtatcccaggctgaattggatttgtggtcctcctgcctgctcctcctgagtgctggattacaaacccacaccacaaaaagctgggctattcttgttttctcccacttccctgggtttatcacctccagagccatccttgcaactgtgattatgtcattgtttacctagttagtccgcatcttctcagactgtaaactgtgagggaaggaactgtaggcagtacctagcatgttatctggcacgtagtaggcacaatcgataactattaactggataagtttgtcttttcctaaatgtaaattaaaaacatcgaggaaacaccaagctccttaatagtaatcagactcaattgctgtcactcacagtgaatcagacaacttcacaggcatcttgtgggaccgcctctttccccagtagggtcttctctggttccataaaacgggtccaccttgcttctttgctttgtggatactacagactttccccttggccagaatctaatatcatctgatattcttatccactgatgaagatcagaccagtttctatggccactgttgacaacaaagagtagaacctccctcttaatctgctcacaggctgtaaatagaatacatgaaataggacgtttataaagaatagaagtgtatttggtgcacagccctggaggctgagaagtcaacatctgacgccacacctgctgagcatctggtgagggcctcatggtattcagtaggatgaagggcatcaggagggagatgagcaaacctgctggaagagggccattcaactccaagcctactcagtcttgacagactgagctgttcttgatccattcacctttccaagatcctacctttcatataactttggcatgtaatttcaggggctaagttccaacataggaaatttcggggactattcaagtcatgccacctccctccatcctcccagaggcataaacaaacagacaaatcaaagacctgatgtagtggctagagagatggcttagtggttaagaccgcttgctggataccactgcctttgcccttgctaggagctgagttcaagtcccctgcactcatataaaaagctgggtgtaccttggaatacatatgtaaccccaaactgtggcagcgagatggcacaatgtctggagctttctcactgtcctctgggctcattgagtataaacgtgcacatactatacacaatgttcacaaacacaaaatcaaatcttaaaaaaggaatttccccttatttagctcagtgacagagaacttgcctagtatgctactaagaggccttggttttgatctctagcgccacaacagcaaataaaatcttaattactagacattcttttgttgttgttgttgttgttgtgggacagtctcactaagtagccctggctggcctaaaccttgctaagtaggaccaggctggccttgaactcacaggtgtgtctgtttctgcctcccaaatctgcctagattaaagagctgtatcactaaactgggtttaggcattcctagtaagatatgaaaatgtattcacagtctatatttaatacagtgtttttgttgtgtcagaagagtttcatcaatctttatacatatttgtacattaaaagagctaattcacaagttgcttgtgaatatttcaagtttacattaaacattccccactcagcgtaactgtgttctgcagaccctgaatgaagcaggtctactatatgtttactatagctattgcttttgcactcttttgagtcaattattttgacccaatttcaacttttttgactgagtgtggttgtacacacctttaatttcagcacttgggaggcagttgcatgtggatctctgtgagttctaggccagcctggtctgcaaaatgagttccaggacagccagggcttcttatagagaccctgctccaaaacaacaaaaccagccttttctacatccatgaaaaactcaaagggtctatgcattgggcagatactgctcatttattttcaatctgtagctatctttttttctcaaaaacattttgcagagtggggggaggggcagttcatctcctttctatatctagggatatctgttccacagtgaagttgactcatcataaatattataataacaataataactggcaaagaggacctgaaaagtctcctccccacgcttttctgtgtctttgtgggtgtgcatgactgtatgtgcacacacttgcatgcgtatttgatgagtagacttgtgtgctgtggtgtgtgtttggaggagtcagaagcactgcctgcaaatgccaggtcagctgacctctgagctccaggcagttttcttgtctccatctcttaggagaaagggttatagatatctgctgtgtagaccaggctggccttgaactcaaatatcagcctgcttctgcctcctgagtgctggattaaaggagtgcgccaccactacctggccagcttaaattcttatcatgtgactagaaactgggcgatagaagacaatccaggaaatgcctggctcctgtgtcatagtttttgagccctaacttttccctacagcagactaatcatattgatagcaactcaatggtagattcttgaaagtgcagccactatccaggaattcctagtcagctaggtaagccagaaggctggccatagttaaataaaaaaaacctccaactagctagtaaaactagggttaaaccccagacagaaggagttcatgtatcctaattggagcctgcttaattgtatttgtattccacgtattatcttttagctaggtgtgacagtatattttctttaataacggtcttccaagtgttttgaatgaccatgttatagaacataccaagtaagagggaatggacttatcttacagcttgctgtgatttctacctaaagcagtcaaaagggcctggggctgtggctcagttggtagattccttgcctgccacacacaaaataggggtttctggtacagacctataatcccatcaattaggatgtagaggcaggagaaccaggaattcaaggccatccttagctacataacaagtttgaagttgacttgggttacatgagatcctatttcaaataaaggaaagtcacaaatacaaccaagataaaattaaaccaagaaagctgatgatttctccccgccttagagaatcctacgcagaattttcaactgaaatatttttatcagaagtgtggtatatttaaaggaaatcaaatcatatgtagtaatgcacacctttaaccccaccactcagaaggcagaagcacatggacctgtgacttcaaggctagcctcctctccatatagggactttcaggctctgcaggggtgggggtgggtggggaatcaggagcatctactcccccacagagtcatttctggttggatgcccgagtcattgtaaaacctttaacattgtcgtttttgatgaagagcttcaaactgctttatgagagtgtgccgagttggttatagtaagagaagaaataacaaagtaacagctgcaggaagcaaaaacaactcagcgccaggagcctttcaacatcatacattttcctgttagtagttgtcctttgaataattccttgcttagagaaggacctcagcctcagaaccaacagcaaaagagttcgaaggcaaatagatgtgactcccttgactgtggaagcagcttgcgaagtcaatgagtcaggattcagcaggatgttatcaatgtttctgattatacctttgttttcccatccttgtttctgcccctcccaggagagatggtgacctctggtgcatctgtgcccaggtttctctttgaagggttgcctaacaatgcccagaggtgtccatttcctgttcttgtaggctcacccagctctttgctgtcattgaattcagtttttcagcaagcccattgtcttgcattattaatatacaattaagtacattacagctattgtgaacaaataaagagatacagaggcattgaagtggaaggattcatttcaaccaggaggaaagggtaattgttttcaaggacaagggctggtacaggtttctgtggaggggtgatgaagagcaataatcaatgatgatgtgaagctcttgagtctgggtcaatgagaatttattaaataaatgaactcccaactggttaacaacaatatgaatgcttatttccaacacaggaagagaaatgaaacaacttgtaggctgtgtagggtgctgaatttggttgtagattcttgtgaaaggatgcctgtgggcaagctatgaaaattggcttagatagactcttttctgaggtcaggcgacagtttatgagttatcagtaagataaagactgtacagccccacagcccctccaccgcccccagacagggtttcatggatacctggcttggcttgaacatacctacctacctgaggattatattgaatttctgatcctctagccttgcctcctgagggccaggattacaggtctgcaacattgtgtacttttatctactgctggttttgagtgtaacaaacaatctatagcatagtccctaaagtgacctttgtgtcaggctatacctagtcacacaaataacatcagtctctggttaaatgatttggtcaactagtggaactgtgggtcaagtttatgacttctcagcattaatttaggctggttttgttattatcttcaccccctttagccattaacaatggtgatgcttggtaccagaagaagcaaggaatcattgcggcggcggggcgggggggggggggatagtattaacaagttagaatgaccaaggggattttgggggcaaccgtgctgaaaggtcaaatgaagaaaaggaaggtccgcacaggatctgctccctttttgttccaggcgttactctttgtcttcttgaaagatctaaggactgtagacttgcaacaacaaatgccagcgtaaggacgactaatttcagtgtggggtggtagtggtgaaaggctaaacattttcaaatcagaaggtgcatgtccagaataagagaaggaaggggtggcctgcaaaatgatgggttccaagcaaacggtccagactggggcatggctgtcttgactaaagcaggggtttcagtgaagaatcccagagtaggttgggaatgacattctagtatccgatagcatgggaaggcccaaccaggatacaaaaggttaggaagttcaaggcggggactccctggcagacagttgacaaagaggagccaaggtcctttccctagatgctggggaagcccggggccccgaagaagcgctctgggtcccacgaactcgccaggcccttggcacgggaagcggaggttcccggacattcctggctgccccatgcatctgggggctccctcctcggagctcccttggctccgtatcctttccttgctcctccccaggagcgagaaaggcatgctcacgcgagtctccacactccgcagcagcctccccagacggatcgcggccgccaggagagtgctcgtcttagcaccggtggcggagcgcacagaacagcttaacggtccggcatccgcatccgcacccgccccgcccgtcggcgccgctgccccgcccgcctctgcgtcatgacgctagcgcccaacgcggaagccgcccgccgcctggaccagccgagggctgtgcgccgagccgcgacgggcgggagccggcgggggcgcgaggcgagcgcagctgcagcctaagcggctgagcgcgcggagcgggcggagcgagcgcccaggactgagcgcgggcggagcggggctggagcaggcgcgcagcggcggccgccccgggggatgcagctgcctccccgggctggcgtgtagggagggcgggtccctggcctcggcggcgcggcggtggaggggaccgagactgcgaccatggcgacccctggcaacctggggtcctccgtcctggcgagcaagaccaagacgaagaagaagcacttcgtggctcagaaagtgaagctgttccgggccagcgacccgctgctcagcgtgctcatgtggggggtcaaccattcggtaaggctcctctgcggcgcgctcctcttgctcctcgggctcagcctcccggctctgctcctcctgctgcagcggtggcagggcggggacctctagccggctagctcggccggtcccgggccctctggccactcgcctcttggggtacccctaaccccacgacaagcgtccatctcctgggtttctccggcggcgcttgcgctccctttggaacccagggagggtgcaggatgagaagcattctctgttctgtgcttctgagcctctccgcggctgtcctgtcccgcattcgtcctcccgccggtcggtgctcgctgtccgcgaagtgggaagtttgtgcggggaccgactctgtctcagctatcagtcctggcggggaaccgctcagggcccagtccgagcgatcgctccacttgtctgggaccgatgggccctcctgccctgagcgggtgggcaggtgaacctgtccctgtcaggaagagtccggagcttctcggagataggactggagtgaatcagaagattttgggcggcagcttgagagcttagctttcttttttcctttaaaggcactattgtcagactctaggagaatttttttttgggggggtggggggtggggaagacgggcaaaggaaaaaaaaaaagcaacgtaaatatggccctggtgctgagcgtcttctcttcatcccttcccgcatcgcccagctgctgtgccctttccagacctcctggcggggagtcttcctccctcccccttgcttcctcccctccttggggagccaggcagaagtcacagacttctgcagaaggatggccttggtggtgatagccggagggggtcccggcggtcgcgagttcgaggtggtctagagttaattacatccattttggaggttgtttaaaagactgtcggggtgcgcgttggggagggttagtctagcgcacagctagggatgtaaggaggtgcgcggctgcagactctgcggactgcggtgtggggggctgaaacagcgtgctgctgatctgacggcgagaaaactcctgcagctttaatcttcttagatgggctcaggaaacgtgataggcgctgttggctgagccttgaaagtttcaatgagcttgtgaattttgaccatgaccttacctactgcagtcagccagcttcagagagagagcgtgagcctgctgctctccttttgttttcagtggatgcccaggtgtccctttcagcataatgtaagtgacagaaagccagcgtggtttttgcactcttaaattaacagagttgtttaaaatggctcagtatcttttatttatagttttcctcccaagcagagctggagaaaggtgaagcaatatgaagatgattgtgtttatctggaacgttttaaagagttgagaaatctattactttactgctgggtctactggggttcattttactgacatctttagctgttaggaatgtcaactgttaaaacagcagacaacaatgcaccccccccccccgttttatttcagaaagcaaagttacagttttccattgccataagtctctaatttagttatgtttggttttgtaaagttctttttgttatttaccttactattagcaacttcctaattattgcaactgggcacgcacggttaatgcaggttgggcgtggacccatgtttacggcccctttaaatctccttttggaattctggtgttttggttaggagtctatgtttaagtagtggcaacaaaatgctgctgggggtgggagtggtgggaagagtgactgagaatgtctggaaaaagttgccattgggcacttcactgtaacatttgggttgctaccttgtgtttatttttgagttgctacatttgttttccagttactctacttggaaaataccgactgaaagatggtgggaacaccgagtgttacttactgttgcttttaagaagttactaattctaagcttatacactgctagcatagtgtatcatttaagcatgtaattaattcaacacaaacatgcagagcctgccacagtgggaaggttgctaaaatgtctctccctgttgtccatgtgcctttattttgaggaatgtgagttgacataaggcagttgtttttcttcatttttctaacaatgtactttaaaaaaataatacctccctcaccatgcttggaagtcatgtatttctggttggttttattttaggaaatgattattggtacccagaagatgttttactatgctttttttgtgcaccaaagtttatagaataatattaaagaaagtaaatccacattatcaataatgagcgtgtatgtaaatgggggacatttgagaaaggatggtagagaggcagatgattcaaatcagagcctttcccctgtaattctaatgtaactaggattagcaaggagaatcttaccatgggtataacaattttttgcttttaaaattccatcagactctttattggacatttaaagcaaccataaatttggagcactgaaaggaaaccatacattttttatcatgtgagcgtctcgtggtgaagtctgtgcttgaatttttaactgagacttggcataggagccagttttggggatcagtgtttgtagctgggaaaggggactgtcgaactagatgagctgcaatcttcctttagtttgatgacagctatttctacagcgtaacagttgatagcggcatcccaggagtcctggagtacacagtgacccttggggtcttctcaaagcctatactggaagaggaagaaggctgatttttaggacactgaactgagtttgccaggttgattatagctgaacttcattgccatctattaaatcaaagtctatttgattgaaatgtagaaatttacaattaagatgaaaacttcccagtccattgtagtggtaataaaaaaaaaaaatcttgatttggacaatgctcggtgtagagaataagcttgccattgtgcacttaatttgctatgttactgctttctaacttaaaatctccatcagtgagtggatccgtgccaatttttattttaagcattttaagcagagaatataattgaatacataaaggaaaagatgacttaaggaggcagttttatcttgttacattcaaaattaaactaaaaatgatcaggcagttagcgtcttaaagtggtattttagtagtgcagggagcatgtcgaatgtatgagccaagacttgttttaaatagatattttaaaagatttttatacactgtgaaatgtgagctctttggagattagtatttcaaactctatttaggtatatgaagggagacacagtgctatctgtacaaagtaacttatgtaaaacaaatattgtttttagaaatagccactttattgctattaagccattgtggcttcaagccatagacacacaaataatttacaggaaaattcttaagtattataggaactttggagatagtcacagtgtaagaaaggaggggaaccagccatggtaagaaccaggtacagtcgcactttcctatccaacctggctttatatacctttctttgttcatagctgcctgagaaacgctgtgggactaggaactgttgacctcctaattttaacctgtcatttctgctccccaaaaggatggcctgtttcctaattcaggcctggaaatactaccaaagatcttgacttgtctggattcaatcagttgtagtttcctcttggactaagtagttaaaaactattcaggaaatgagcccctagagagagttcccaagagctgggtgggcggtgaggcaggcatctgtcctaggaatagagttggtgttgatcttcatgcctgtggggcgtctgctcaggtcagtcttctgacaacatgccttgtcatgtgtggattagaggatgccgagttttccacgtgggacatctgaaacatgcattttattctcaacaaggtggggattgaagataggtaatattttattccaaaaatgtaatttttctgggttccatgggttgatatttggatacagacaaaaggaggtgcaggagaagcaggaggaggaagaagaggaggaagaagaggaggaagaagaagaggaggaggaggataggtttataagtggtgtggattattactatggaatgagagtgactgaaaatgacatgatgaggcaattaaaatataaagaagttagatactagacagagctcacaaagtggaacccaaccagccatgcattccagagctagccccacaccgttttttcctttacttttctaaagaaagaaacagtcacacatggcagtttactattaaggcttacttagtgttcccttcaaagattagtattatctttttccagtgttcagaatgccgccccaaggcaggatgatctgctatgcctttagaaagactgccaataagaactgcagtacaccaacagaattggtgttaagttgatagagcagttaattttgccagcatgaacttgaaatacataaatcaacactgacaggagttggtgcaatttggcaggattgtttgtggtcaggctgattaggatcaattcctgctttattgtttatgggtttttgagcagctggtttacccacttgaatctcactttacgcatccttaacatggacgattgcctcaaggaactattttgagtgttaaatgagacaatgtatccaaagcctactggtaagtactaaggattcagtcatgattccttaaactgaccaaatttaaatcagttatgtaggctgcaatttgtggatgatagctttatttgttcctggtctagctcccaaataatcgacacaaagatctattaagtttattagcaagctttaagcactctgactgggcaaatatgcatttattttaaccctctaagctatctgcatcctagccataggcctggtgttatttgtactgtgagtcttgctctagcttgctctgctctgtatgtcctcatggtgaatcccttggtgacctctcatcatgactcctggaccttctgcctcatggtcacctgtcccttctttcctcgtggtcattctcttacttttttttccccccttctgggctccccagctgagatcagaagttcagccttcttatctcctctgcccaggcatagtctgagtcagctctttattgagcaatcagaaacatttttttacatgacattgaaaccagaggtgcttgaccgtgccatggtcgggactgtagacagatgtctggtatatatacagcagcatctgaatacatagtgcacaagaccaccccccacccccccaacacagttatgttggtaacatattagtaagcactagatcaacagttttccaaatttattatgcctataaatcacaaggatcacttgggaacttttcagacactgattcagcaggtcttgtgagtatgattttaggtggcgatggtctgagcctctgagctggtcttaaggaagcaaggcagaggaaggaatgactttaaacaaataaatgttaagaatttgtctcccagctgtgtgtgatgaattgctttcgctctcaaccttcctaatggtgctaagcattattaatgtaattacttatgttgtggtgaccccagccataacattatttcattgctacttcataactaattttgttactgttttgaattgtaatgtaaatgtctgatatgaaactcctgtaaaggggtcaggacccccaggttgagaaccactgccttaatatggtaaccctgtaatagaaatagaaaagctaagagaggggattgtgcattggaaagggattttatagtttatgaaatactgacttgctggtgaagattgtggatagtctggttatcaccttaggggattagaactccagaacaataggagggtgggaatagagttgagactcctccacacacagttggtaattgtggtagtttgaatgagactagcccccataggctcatatgtataaatgcttggttcatagttcatggaactgtttgagaaggattaggagaagtgcccttttgaaagagtgtcactgggcatgggcttttaggtctccaaagtccacatgaatctcatttttctctgcttcctgcttgaggatgtagattgaaacattctatcctgcagggaagccccttgagcagaaaggtaaacaactcaaaatgcttcaggaagtccctgaaactgactatattctctaggtctacctactagagtgaacaataaaagccaagagttctttgcaaagtcaatgtgagctgcaatgcagattctgagattagaccagctgcctagaaggagcagaaataatatgagctacctagaagacatttagatcaattgaggtgccaggaaaggacactctctaacctgttgagctgcaggtgtgcagtgtttcaggttcctggctttgtgagctgccacccaatgctggggtgggccttgctgatacagctgtctctgagtcatttctgttcctttgagtaattccttaccaatattcctgtaaataatcccaataaaactcattggttcatcaaattggactttgatggtatccacacattggtctgtcacgggttctccatctgagatgaatagatgtacgttttgtgtcagatataagatctcagttactgttcctgcaccatgccttcctgctgccatgctccctgtcatgctgttcatgaacataccctctgaaactataagaaagcccctaattttttttttaattttttattaggtatttagctcatttacatttccaatgcnnnnnnnnnnnnnnnnnnnnnnnnnnnnnnnnnnnnnnnnnnnnnnnnnccccactcccctacccacccactccccctttttggccctggcgttcccctgtactggggcatataaattttgcgtgtccaatgggcctctctttccagtgatgactgactaggccatcttttgatacatatgcagctagagtcaagagctccggggtactggttagttcataatgttgttccacctatagggttgcagatccctttagctccttgggtactttctctagctcctccattgggagccctgtgatccatccattaggtgactgtgagcatccacttctgtgtttgctaggccccggcatagtctcacaagagacagctacatctgggtcctttcaataaaatcttgctagtgtatgcaatggtgtcagcgtttggatgctgattatggggtggatccctggatatggcagtctctacatggtccatcctttcatctcagctccaaactttgtctctgtaactccttccaagggtgttttgttcccacttctaaggaggggcatagtgtccacacttcagtcttcatttttcttgagtttcatgtgtttaggaaattatatcttatatcttgggtatcctaggttttgggctaatatccacttatcagtgagtacatattgtgtgagttcctttgtgaatgtgttacctcactcaggatgatgccctccaggtccatccatttggctaggaatttcataaattcattctttttaatagctgagtagtactccattgtgtagatgtaccacattttctgtatccattcctctgttgaggggcatctgggttctttccagcttctggctattataaataaggctgctatgaacatagtggtgcatgtgtccttcttaccagttggggcatcttctggatatatgcccaggagaggtattgctggatcctccggtagtactatgtccaattttctgaggaaccgccagactgatttccagagtggttgtacaagcctgcaatcccaccaacaatggaggagtgttcctctttctccacatccacgccagcatctgctgtcacctgaatttttgatcttagccattctgactggtgtgaggtggaatctcagggttgttttgatttgcatttccctgatgattaaggatgttgaacatttttttaggtgcttctctgccattcggtattcctcaggtgagaattctttgttcagttctgagccccattttttaatggggttatttgatttcctgaagtccaccgtcttgagttctttatatatgttggatattagtcccctatctgatttaggataggtaaatatcctttcccaatctgttggtggtctttttgtcttattgacggtgtcttttgccttgcagaaactttggagtttcattaggtcccatttgtcaattctcgatcttacagcacaagccattgctgttctgttcaggaatttttcccctgtgcccatatcttcaaggcttttccccactttctcctctataagtttcagtgtctctggttttaagtgaagttccttgatccacttagatttgagaaagcccctaattaagtgcccgtttttataagatgcgttggtcatgatatcttcacagcaatagaaaagtagctaacacaggcatcgaagaatggattattcactattcttgttgctgtgagaaaatacctgcaaaaagcaatttaaggttttgctcacagtgtaaggtgacagtccagcatggcagggaccacatggtggtgggagcatgagtgagacagtcgcatcaagtccgcaatcaagacatagggagaaatcaatgttggctgattgagtctgtgaccccaggccatgggatggtgctatctgccttcagggtagaccttctcttctcagttaagccttcctggaaacagaaacgcccttgtagacacaacccaaagtctgtttccatggtgattcaaaatcttgtcttgttcaccaaatggtgaagtagatctcagaaggggaaagtagaactgtgggcctttgagagagggacagaggaagaagaaagaggaaataagaaacaagctgagagaggatgctgagagtacaggcttgtgcaccttgagggtcattgcttcagggaaggagggagggagagagatagtaagattaactatcaaaagcatcagtgaatgaatttttatttttctggaagattgggaatggaggtgagaaataccatccaatttagaaatatgttttatctctctcttactgtttatcccttgattcagccaagtttccctcatttctagactgttgcttgagctttttagctaaggtctctctcagtgtctctctctctttctctctctctctctctctctctctttctctctctctctgtacttttattaccatttctttaatttattgctccagggagccctatggtagtgagagaaaggcactattcccttctcaaaataatgctcttaaatgaattctgttgagttcactgtttccctgaattctgtttgtggactgtacagggattcaaggggcctagtgaagaacacttccaaggataaagtgatcgtggagtagggagatgatgcaggcagcagtggttgaaggatgaacagagaactctggtgacctcatgaagccatgccaagtgacctgtatcctgaccctaggtccaggagtcttaccatttcctttagagctttcttccacagttcctcgtgttcaaagctgttcttgggtagacaaattgtgaactgttgatattgggtaaaactgtttgaaaacacccttttcccacgatagaaaagaaaatcattgctatgtgaaaagcatgtaggcagagataaatatataatctattcataggaaaatgttgttgagagttttaaaacagggacttagtgtgttggtcagaactcttgtcattgtgataactaacaagctaacctaagagtaacagccacaaggaagaaaggcctactttggctcctggcctacgggatgacagtgctgagagcatggggctgatgctgcagagtgggagtacaggaagtggcaagggccaaaatattcccttcaaaggcatggtcttagcgacccacccactttttaaaactaggtcctgatcttttggctactttgtgggttcttttttcttccacccttctcaaccccttttctttgatcctttcaaccccctaacactaaataagagaagaaaagatagagggtaaaggaaagagatccttaaataaggtcaggagtcagaaaggcgaagacattattgttagattgcttcctgttgattgggacatcaagttacttgggggcaagtttgattgccactgtcaggataactaatttcttactgttttttctttgtacactgccacctggatcaacagcaaccaaccaataacccacccttcctttcagggccttagcatttatatatcttctgaaaagtccccagaattccaacatcaccaattgcagaaactgtctgcagttggcaaaatcactccccgaccagagcacgaggcaaatcatactcagcaatcccatatcctatacctgggattaaaacaaaaatatattcgtataatatttctgtggtcttttttttttttttaagaaatcagaaagccaaaattctcattataccttcagattaccatcttccaaaagtcttttaaaatttgaacctctcaagagttaaactattgaatatgctggagcttgtatggtttaaccttctctggaaacaaagactcagtcatcttctaggctagtcagaattaactatcacacttacctaaaagttacagttgtttgtcaatctttaatttttaaaggtttggtttggctcacaggttttttttttaaagtaaattatgtatttattgcactatgtatgcagcatgtgtgatttatatattcatttctaagcatgttgaatgtgtggaggtcaaagcataattttgtgcattggttttctccctccacctttacacggctccaggcatgaatatcaagtggtcaggcttgctcagcaggcaccttttagtctctgagctatcttgccatccctagttaaatgtttcaattctaagtattcataatttttcaaatggaagtagttaggagctgggttgtggcctggagcacgaatagtacttcataggaaggtagtgacgcggatgcagttaggataggtgttctttatcttgtactgggttatgtctagataaacctagcatagttgaatatatcactagtgtatttaatacctctaggcatcatagttcaggctagcctattttaagtatgcttagaacacttattcttgcctacatttaggcaagattgtgtgtcttagttgattttccaattgtgataaaataccctgataaaaagcaacttgaggaatatttgtgtttatcattctgtgttacagaccagggagacaaagaggtagaaatttgagatagttgctcgcattgtatccttagctaagcagggagggatgaatgtgtgtacccagttgacttccttttatacagtctggtatctcagcctaaggaatgatgacactcacagtgggtgcgtcttcttgactcaaattaatcacgataattccacacaagaagcccagagaccattttcagaagtatttctagatctcagcaagttgacattgggatcagtcttcacacaaaatatatgaaatttgtctttgttgttgaaataaagtcttgactatcatgcactttgttgaatgtagtctgaaaggaaaaacggaaatgggcatatgagtatactttgtacaattggaggttgaaaaattataagtcatgtttggactgtacttatagaccgcctaagtagctgctggtacacattcttattaaatggtagcttccattattattttaaaaacactatgagtgctaagacataccaagttattaggtcataaataaattaattgttactttatcctggctcataatatcagattaccattggatttagtattatgtatttgtgagttattgtaggttggcctgatgttgcttgcattctaatggtaatactgattctttaagacctggttgccccagagacaggagcatctgcaggtcgacccaactgacaagtgatgctatgagaccttgcctccagttacttttgattgtgaataaagatgacaacagccaatagctgggcagaaaaggcataactgggttttatggttccctggctgaaggttaaaggaaaaccacgaaagaggggagaaggccagtagaggagaagccaccatgggttaggtgagtcatgaaaacgtggccctaagagctggccagttggagttaagagcagctcagatgaaacatagtaaataataacttggggttatcaatagaaaagtaaattctagtagcatagaaagtatctgctcttgtgctgtttgtaaataataaaagttgtgtgtcttttatccaggaactagttaatcaagccacaaactgggattaaaaattcctacaagttatgaatcgttattttagaattttccatttgtcctggctttgctttatctattttgttactgcattcttcttcttttttttttttttttcaatctttaatgcctccactagtgacttggtgattagaggtgtcaaaatctaatttacagtcattaaatataaattatatgaactattgaattgatatctcacctttctgtttttttctttaacataagagacacttcaaggtgcttcagctgcaaattgaagcaaccatagaacttcagtgtgtgtttcttcctggtccaattacaatgttcttccctggattcttgaacggttcctgtgcagatggcccctctaacctaatgtactttatataccaatctcatatgctccttccttttctctatgacaaacactgtctaaaacagttgcttacatgtgtattattattctctctcacatacattcagtaatttgcagagaatgaaaatcctgtcatatatatataccctaaaaatgcttttatatagagttggcattcaaaaaaataccactgaataagtggtccatttgtcccctcactggtgtctcaggagcccttccacatccagtcctcatggccatgcaaaggatgtttgggtgatgagtgagcactgtactagaacattttgctgagctggttgtgcaatgtcttaagatgggggaacttgctgcaaggtataagaggtgtggggaaccacagggccggacccaagggagagctgggttcaccgagcaggctggagccttgcctacacgccccacccactcccccagcagagagacttcagagaagcaacttcctcagacgctggtggaagcaaaaggcccaccaagtgaagtgtgcgaagactgaagttgtttctaaataagagatgctacagcagagatgcacacagcagagtcacagcccagtgtcctcatgcctcatgcctcgttccatcgagtttgaatctctggagaccttcagacatatctctaaaatgtcccatcctcaaaagatgtgccttaagttatattccataagcatatcagatggtgatagccccctgtctccgtcttccgggtgttttccagcgggtgttgtttcttctggttcttcccgggctccttactgccacacctacgtggttcttctgaaggaggacttctgaaatcttagggtggaagtatgacgcacggaaaggtgttgtttgtgtcacatgtctctgggtactctactttgaacacacccacattacttggacctcttggtaatgtgaatttgggctgcgtcagtctgtcttttccttttttctttcttaaattagtgttttgcctgcatgtgtatgtgtgtgagggtgtcggagttgccatgtgagtgctgggatttgaacatgggtcctctcgagtagtcaatgctcttgaaccatggagccatctctcagccccaagagtgtcagtctttaacacagccacagggaaaagggatttcttgatggactccacttcttggttgggttaggctctgtcctgagtttctgtgaacactaagtgatagggacagttgactggctttggcaggccatctctccagctaccctggttctccaagcctttaagagggtattttgaaaaccagcttgtttctgatagcagaactagaaccccagctctgccccctcccctcctattctccccctctggccctagactagggttgcaagcttgggcaaccatccatgtgtcttagttcactttctgtttctgtgatttaacaatataaccaaacacaactttgagaggaaagggtttattttagcttaatggttcacagtccatcacagagggaagtcagagcaggaacctggaggcaggaactgaagcagagaccatggagaagtgctgtttcctggcttgttcctcatggctcacccagtttgttttcttattccaggaccacttgtccagggatagtaccagcccacagtgggctggtcccttccacctacatgattaagcaagagaacacctgcctatcagcagctgatagaggcattgtctcacttgaggtccatcttctcagatagtgctagcttctgctgaagtgacataagcttttgtcgtcctatataacttaggttgtcttctgggaactcagtcttactgcatgcatggcaggcattttactgactgggcttcagcccttccaccattgattagtgacccttcatctgttaagtctgtcaaggccccttctaactttattgttgtgggaggaaaataatcttggctttttcaaacgtgaatatatttcagtgcatcataattctttattttcccccattttcaacccaaaccaactgccttgtgagtgggttgttaaaaggggaatgtcaagagagtgcgattggttaagtccatttctagtattgggcagggagcctaggctcttaaaactaacccagcgattcctgttgattatattggagaaggggggaaatttttattaccttttcaagactataactgtgttggctttagtgtgcgtgagctcagtgcctgttgaaacatccgtgtaaggagtttgccattgtggctcatcactttggagggttctctccgtatttgccagacatcacggcagtgcaaggcatagcagagaacagttgttcacctcaagtgaacaggaaggagagagcaacaggaagtggcctggagcagtgcacctcagtgaccctccttcttttgatagccctgcctcctaaagactgggaaacctaaagtagttaccagctggagaccaagtattcagaatattatcccacgagaggtagaccttcctgattgacaatagacttttttctcacataatatgtcctaattaaggtttcctgtctctctgtttctccagttccttctcacctcccctcatacccccacccagccccttcttgtctctcactggatggaaaacaaatagatttctaagggattataataagatataataaaataaaataaaaactaacacaaggtctaagacaaaacagaaggaacagagcccaagagaaggcacaagaggagatggatgccgagagccactcatctgcatgctcggaagtcccataaaacactaaactggaagccacagatcatacccagaggacctgtaggggagagagggaggggagaatatatatgtaaccaacataaaataaagataaaaaataagattaaaaaaataaaggcctggcatgacatgagaaaggaaccctcacagaggcctttgagttccttttctgttgtctgtctactgctgggcatgcagcctgtccttagagttatttgtttccgcagtgagacgccctttgagaaaacagattttcatttgctgcttgctaccaattggagacagcttctgggttaagcatagggacttaacgattactcctttcaactgaaggacctgtgcaggctctgtgggagctgcctcagtctctgtgagttcatctgtgcattggtcccattgtattgagaaggccttagcgtcttctgtcacctctggctcttttattctttccacctcctcttctgcagggttccttaggcgagcagtgatttgatggagacatcccattcatggctgagtgttccagggcatctcattctctgcatgatgtttggctctaggtctctgcatttgttctgttctgctgcaggaggaagcttctctgatgatggctgagcaaggccctgatacaggagtgtaacaggatgtctttaggaatcagtttattgctacattcttttagtagaagtgtttggtttcccccttggtccttgggctacattttctagtctcagggccttggacccaagcagtgtcaggtgtgggttctatctcatggcgtgagctttaagtcaaaccagatatcctacaagctttgtgcagctattgcactagcatttcttgcagccaaggacaccgatgtagatattcacttttttttttccagacagggtttctctgtgtagccctgcctgtcctagaactcactctgtagacctggctgacttcaaactcagaaatctgcctgcctctgcctcccaagtactgggattaaatgcgtgcaccaccactgcccggtgaaacaaatattcttaatcaaaactttaagataaattcttttatttattctacacaaaattattatccatttattaaatattagatgctgatcaagaccttaagaagagtggcaaggtcttagctttgtaaggagggagtctactacattctgactgggaagataggtatgggattgtaggttgggaaataggtggggtcacagaaatgcctcactttgtgaatttggtggcttgtaactgtgacagttactaatcagagtagcaaaaggcaggtgggaggaggtacaggtggtgaggctgaccagctcctgccagcccccagatcaggacccaaagcagctttattttctcctggagtactacagtctctaattgtggtgtgtatgagtgtgcacatgtgcatgtgtgcccatgtgtgtttgtgtgttcaagtgtgtgtttgtatgcatgagtgtgtgtgcaggtatatatgtgtgtgtacatgtgggcatgtgcatgtgtgtatgtatgtgtgtacacatgtgggtatgcatgcctctgtgtgcctgtatgtgggcatgtatgcctgtatgtgtgtgtgtgtatgtacatgtgggtatgtgtgcctgtgtgttatgtgtgtgtatgtgtgcgtgtgcagagaccagaggttgggagtcttcctctgttgctgtctactttactgagatagggcctctctttgaacatgaaacagcattccagctagactgcctgggaagcgtatcacctttcctggtatttttatagattagaactcacatactacctagtttacctgttcccagatctgggtacatcgatattataatcagccattctcaatcccagtttcagacttattaagaatgagacaaagcctaggtatgtatccgaagacgacccactgtggctttcgtagctgggtagctgtgcaccacctgagtgggtgtggtcattcttcgagacatcctgcccagggcactcctaacaactcagaccctggggtgcacagatgttccagggcagcagaggagaatttgtagtgttccagtgggatcttgaaattccttggggtttgggctggagcttatgtggtagggaaactaaggaaggtgggtgtaagcacggtaattagcaaatagaacagcaagaagcatgaagggccttgggactgctgaacctttcttctggtacaaattgcttcttctacttaagtgtgtgtgtgtgtgtgtgtgtgtgtgtgtgtgtgtataatgcatgtgcactgcctatgaaatttaagtgctctgcatgaatgcccagtgccctcaaaagccagaagagagtgtcaggttccctggcattggggttacagatagttgtgaggctctatgtgggtgctgggaagtggagcagctggtgcgctcggccgctgagctgtctccccttcttctccttttatagttctactcatttccatttttaagaccatactgctgtttaaatggtgtctgtttgcacttgtttctgtaggcttggtcctttatggcttgaatcctgtctggaagctgctgaatactttttctttcagcgttcggtgtcatccgcaattatacagagtatcgtttgtaataagcattgcttggcttggttgtttgctctgaaggttcagtagtagtaaccctaagagcgagctctctatggtgccacatagagccccggctgtgggaataggtgggagctgacttgagcattgcctcatgcacaacatgtctagtgctaccttagcaggataagcactgtaactcgcagctcacagggagctgactttctcgtgcttagaggggccagtgtgctgcagtgctccgcatgcctggctttctcagcatgtatcaaacattcctcatctcagcttcccggatggagtaattcttattactctgataaaatacctatccgaagcaacttaatgttgtaattatttaatatcaaagggggggtttctgccccacctttacacatttggttcccagataaaaggcatacagcttttatagttagagctgggcagatatctcccctctaagttatctgactttacttccccatcaacaaccccaagttacaacttgccatgttctatttgggcagctcttacctcatggccatgttttcatgactcccctacccaaggaatcttctctattttccacctcctctttcacctcctcttggttctcctccagttcacgagcctgagaacccaaactctgcctacctctcttctgccccgctataggttgtaggcatctttattcaccaatcagggatgacttgggggacaagattgcatagcatcacttgggtctacatgcagatttactcatccctgggagcaaccaggcattgggagcagtatttagcattataatacatagaaaaagagcaagcctcaacaacttaaggaaggctttgcttttggctcattgttttggggcacttcccatcatggcagggaaactgaggcagctcatcttacatctgtggtagggaggcagagagtgaatgctggtgctcacctcactttcctttctaaacactccagtacctcagccacgcttcttcagataggttttcccacttcagttaactgagtctagaaatgttctcacagacatgcccagtctctttagtgaggctagaccctgtccagctgacaatattaacccatcatatcaagtctctgtatccttgaagaagctttcaagaggcatacttgctggaaagaatcttggcagaattgattctgttttagaaataaatgcagggttatgcagtctcctttggcctatgcttgttatgcatccaaattgatgtataggagataggtaagcaggggatgtagccagcgatgcaggaatccatccttccagtttcctttgagtctatcactgctcagcacctctgagtagtaggagctggatacagagtgtatcagcagggaggacaggagggggttggcagactagattgtgcaccttgctcagctggccatggctttcctcctgttcctgtgccaggaattccatcccagaatatgtttttagagttttgggttttttcatttgcattttttgtttttatgtttttcgtttgttttgttttgtggtttttcattttcattctggtgatggagttctatagatttttatgatctccctaaaatttgtgtgtgtgtagaatttaaatcttttggggaatacacaaattacatcacagcagaaggggtcacatttacaggttattgtgattagctgtgagcccagcccagcattcttgtaaacacacacagacatggttggttggttggttggttggttggttggttggttggttggttggttgttggttggttggttccatggagtggaggccttgctgtcttaagtaatcccttgtctaaaaagtgtagagatatattctaaacatgaatgttgagaagtgtggagacactgtctaagcatgagtgtgtctttaaaggcttttagcctggggagcggagaccatagccatgtgtgtgctggacgagtgatcgctctaccatcaagctccacctctaacctgcaaacagagctccttatgggccctttgaatctcctggggaatttgcttcccgccctcctgtatcctgacttcctgcattccccaatatattcagatctctcaagggtgtgctctgaccagtttccacgcccctctgtgctagttagtaatccactgcctccttcagcatccacccttgcaggccagcttgcaagtgtacgtttggagcagaactcagttatgagttaggtccaagtgctttggtgtagaaaggtctctgcagcaatggttttgataagccagcgaggtgctttccccccacactcagccaacacgggaagagagcagtaatcttaagtgacattctaaaatggaaagaaaagaaagagatgaagggaagctagtgcgttcctttgtcatgttcttctcctttatggttaaaaattccgagtgaatatttgatcaagtttatagctagtgggggttattttcttaatgtgttatgtgttagtgagtattacaaagcatattctgatgtgtctttgagtggtgtgttcacatagtttcaatagaatttaaatttcgctatcactatgcgaggtcctttctaagaagcgagaagatgaacataagcatcgctgtaaagaatagttaccgtaactgtcccacagcaaccagttcactggctcactctttctccccggcagcttttaggacactgacattatattgtctttgtattttcttatcttcctgtgcatttttcacaatgaaactttaactgttttgtttttgttgttgttattattgttgcttttgagaaaaatacaaacctttagcctaatacttgctatgtagaccaagctggttcacagagatctgctcgactctgccttccaagcttgtgtgttaatatcccctgcagattttaatttgtaatgcatagttttatgttaaggacggtttcatgttctgtccattggctctagcctttactgttgtaagtgctgctgctgtctgggtaacatttacctttatgttgactgatcccctaggacacagtgtccttcatgggaattacatggtgaaagtgtaggcatactatagggtcatgacatgtgctaccctaccacattctaaaagatgtcttcgttttagagttaacttcttcaccctgtgtcttgctttgaatatttcaaagttgaataccagtaaaggatgccttttgtttatatatggcataacttttgctatagttctctatttctaatgacctctgaaagcctagtgttcctagctgcagcactgtgtgggtggtggtaaagaattgagcaagtgcctgataaaaggaagtttggtctgtggtacttgccctagaaggagattttgtggccctgggtcctcctctcttagcctttcctctttagtttcttctctttctcccatggagggagcaggtcttgtaccagatgctaggtagaaataatgcatcatgatggatcggctccacaggcccagagtagccaggtaaccaggagccaataatccttattttgaagttgattaattcatatattttatatgaatgcaagggattcatatattttctcacagggatgcaaggctgactcatagactctaagannnnnnnnnnnnnnnnnnnnnnnnnnnnnnnnnnnnnnnnnnnnnnnnnnnnnnnnnnnnnnnnnnnnnnnnnnnnnnnnnnnnnnnnnnnnnnnnnnnnnnnnnnnnnnnnnnnnnnnnnnnnnnnnnnnnnnnnnnnnnnnnnnnnnnnnnnnnnnnnnnnnnnnnnnnnnnnnnnnnnnnnnnnnnnnnnnnnnnnnnnnnnnnnnnnnnnnnnnnnnnnnnnnnnnnnnnnnnnnnnnnnnnnnnnnnnnnnnnnnnnnnnttttgtttcctggcagttagctggagagaacagtggtgggcaggtatcagccagaggtggataatcttccaggcagatggttcctgaaccccagaagaacgttagcagcatttacagttggtgtgtgttgcactcgggccagagcatttgatggcaggagtttgtagccagcctgaccactcagccctgcacttgacctttgtatgattcagatgaaaatgttcagaaaatttaacacgacatccctttgggtccataattagagtgtgtgtgtttgctttcagaggttggatgctgtcatctctctgtggtcctgtcagccttggctgtttgattcagtgtgtgcctgcagtgttagatacatcatctgatgttaatgaggtagtcatctgataccgcagctccttccccaagcttggtgtggccagacagggaaggggaaacagtgagaaagacaagtacatgcttatagaccagagctccatggagatccacgcttccagtgtgaggatgtgttgctacaacctggtaactgtcactgctacttacaagaatctaagaagggctttaaatagagcccttgcaaaacttcttttcataaaagttgagcctcaattgattctcttttatttttaatttcatttaattaaaatcttttcattttatatgtatgggcattttgcctgcatgtgtctctgtgtatcgtgaatgtgcctggtgcctgcagaggccagaacagggcatatgaccctctggaattggagttacagataactgtaacttgtgggttctggcagtcaaacctgggtcctctgagagagcagccagagttctaaccagctgaactgtttctccagccccctgattcttacttttttatagtttaaaattaaataaaaacaaaattaaaagtcctctgtaaaagatgatagtatatatttagcttggacaattctaataaaaaattatactttattttgttgtcacttaaaaatacaaatgttggcataaaacagaacctccaggctttgggaagcagggacttttcagtgtgagtgacttaggtactttttcatttgtttaaaagcagaatctctaaaattatgggtctaaatctcttgtgccctttctgtttttaagaggtagagacaagagtataccttgtttcctcccacaagacttccaaaaattctcatattagagaactattttggatggatcaattttcctgtagctggaatgatcaaatgctactttaaaataatatatttccatttttggatcttccaaacgagacaccattgaatactcaattgatcgggctacttatacaaagcaaagaccattgcgatggtgtgttgtgtatattagaaagttttccgtagaacttttagatgcaccaattgagaggagatgtataagtggctacctgagcatggacccagacaaggatgacattaggagactcactaatgtgtaaagggagaagccctgtggagaacattacagtcaaactgttacaggttcttatcaaagagatagcccagttttgtgacaggtagcctaaatcaaggctgctggtacattataaatgctgagtttcttgctgttttttattacatttatatattttagtggttctttacagctcctcatgttgtggtggcccccaaccataaaataattctattgctatttcagctgtaattttgttactgttgtgaattgtaaaatacatatctgatatgcaggctatctgatatagaaccaaaaaggtcacagcccccaggttgagaaccagttatttatttagtatgtgcatggatggaggcatgtgtgccttcgtgcatgtatggggtcagagcacaacatgcaggagttgcctctttacaccatgtgggacttgagacattgagctcaggccaccaggactgacagtagcacccttaccaactgagctatctcactgactcatttcttaccttttagggtaaaattatctagaagtaggagttctgggtgttcccgtcgcttcttcttgcacctgatagattgttttagtcctgatctgatatgttgcttattcctcttcctgaaacactcctttgcagactttcagacccagtgtgtgaatgaagaagtgactgcacatgtgcatcttaccagcttctagatttgtttcaaacgtcttaaaatgttagaacaagacagttcttgtggacttaccaccccccctcccaatcccttttctgtagatgagatcatggacagacattttgggacagcactcaacagtggaagcagggctggattgtatgcctactctggaccatgcttatgtgtatgctgtattcttctatgggtagtgtggctgataactgtccagctaactagtgggctctgctggagtctaacttcttgcagactagtttccttttcacatttgctgagtcagtgtctttgcatccaaacaaatgtccttgatatcacctatctggttcttttttttcctttttcttccttcttgtcagagacataatgtgtcatctagctaggactgaaatggatagtgttcttatcgatagaccctcatttctggagaagtagctatctaagagcaatatgcacttgtagaatctggaatcagccttaggaagatacaaaatgttgcttttttttcccctcagatgaagtgatgagatgagagccacacacaagctgtgtgaaaacatggcttgggctgagcccagagtgcttccttctctgttgtaactatcctaggcctaggcctggatgcttctagcctctgtacaatctaatcttccaagctgactgactcattctggcttctcttgacttctgactgaattgctctgtctggtttcatactaactttggctatatgtgctaatattctggctcctccttctgtggctagttctattttcacctatgtctaacttattctctctgtagcctgccctgtaaaactgtcccagtaaaactgccacacatacacaataccaccacctgctacactacttttttctctctcctgctcttaagtagcctctcttcctctgctgttctcatgtgaattgagcatatcctatctctgactcattttgtcaaatctttctctgattcgtcactttgtctgcttccttttgcaaattaatcttaccatcattgttaggaattaaaggcatgttctaagggtgtgtctgtattccagccggatcctactataatccagggtgtgtgtacattccaagtggatcatatctttggatgtgattctttgccagagcagcaatgttactagattaaaattcttctacaggaagaggctgagaaagcactcaatgtaaccctcagagggagtccctgaattcagagctgtgtattagacaagatatgttaagaggaagagactctacatacagcttgcatatgtttatgatgaccattctatgctgcttccatcccatatagtctgctatgtcttttagacaactttccattgtctcaggtactgacagtttctgatgtattgctcagactgccaacgccaaggaacggagtctcaactgtagtccagagatgctctgagcagctttttagtcattagaaatacattgtccacaaaccttactgctgagaaattagacttacagtgtgttgaagtttgtttgttgcttgctagctttgagacagggtcttcccacagcccaagcagacctcagatctttatctttctgtctcaactttcccaggtcagcgttgcactgacaacaggctgcccctttacgagggtcagagcaatgtcagcagacagtagcaatagtggaaggccccaaggaggccaggtgtgaagaacgaaatgtgggaagtgggaactatttatgctctccaaaacaaaagcaaaaaatggtatacagatgtagatttttttttttataaaaagtagtgaaattcttgaaaaaaaataaaaagatccagaaatctgaacaaggacttgtagagcgagcagtgcttcctcaccttctgagtgctgtgactcacaaacatagttcctcatgctgtagtcaccccaactgtaagattactttcattgctactttgtaactgaaattttgctactgttattaatcataatgtaaacatctgtgtttcccaatagtcttaggtgaacctagtgaaagggtcatttgacccccaagggggtcacaacccacaggttaaaaaaaaaaccaatatgctagaagaaaaaactctttttttataagaacttaaacagagttttagggcaaaaagcctgggattggcctctcacccagcacagggagaaaagagacatgattatggacggtcacacagaagctcagataaaggggtcttgtgatcattgtgggaagccacatgtgccgttgcagagtggcgctggctattgctggccaccacgaataagtttggacaaacaaccaatgtgtacatatgcagtaaagctttttgccaagacactgcctggcccgggcatgctaatgaggttttgagagtataaccaatcagatgtgagacatgcaaatgaggtatgataatgaggctctgtgaggtactgagagagagtaaccaatcagatgaggaacatgcaaatgaggtatagtgcataaccaatccgggtgtgagacacgcctctcctaggcctatataagcagtaccagttctgggctcagggtctcttcgcctctgcaatcaagctctcccaataaacatgtgcagaaggatcctgttgcagcgtcgttcttgctggtcaagtcgggcacgtgcaagagatcacagctctgtcttcagattaaataaagaattgtttcatgggactaatggggttcgtgaaagtgtagctctggtcagggtctggccaggctggccattgtctcagccctggctctgcaggattttctgtgtagttatcatccttaaggaatgcagtccggttcagagatggctcctactgcagcacctgtcttcaacctgatttgccctccatgacccatttccataggcatggttccttttagattcaaggtgacaacaagctcaggctggtaatttatcgttgtgccttgtgggtccaaaggagcagttagtgctttttagcaaaggcaggttttcaggactgttccttgaagatgcttatgcaagggaatgagaacaggagaacgagggcttcatcttgtaggaataggtgagaaaagcccatggacaagcacccgagagttttaaacataagattctaggagcttgggctggagaggtggctcagcggttaagagcactgtctgctcttctagaagtcctgagtttaattcccagcaaccacatggtggctcacaaccatctgtaatgggatctatgcactcttctggtgtgtctgaagacagctacaatgtactcatataaacttaaaaaaaaaaaaaaagaaaaagattctaggggttcacgaggcaggatgaccatgaccaactggggactgccagctctgtccaggcagaagggaaatagcacatctgagctgtctaccatcctggctcctgtcatgcacacagctctgtggagagaactaaccacaagccagccaccttcatgctttcttacaggacattttggagatccatgcctcttctgccttccccggggttctagaggtgctctgtgggggagcacagagagccaagtgccgcagtccttactctgagcaagcagggcagggggagatctttgctcagtgccccactgcccccttgttctcttgttgcatttcaccaaccctatgctgtttttcccttgtttagaggaaatgcagattattgatttcaaaactcaaagcagccaaaatgaccataccatctaaaacaacactgacaaaacaacaacaacaacaacccaaacaaacaaacaaaaaaaccaaacaaacctcacattagagtcagactgcttaaaattctagctctgctgttgctgtggacaaattgctgattgccagtctttccaagctcagttttctcctccacaaagtgggtgttttgtagagcacaaaatgaggcaaggttactcgagtgtctccagggctaaaggtagtggccctcaggcttctcttggaaggagacacaccagttttgtgatagtccctgggggttggagggagggagggagagggaggggcaaatgagtcagttattcctattgggagtgagctcagtggtgctgctgcctcgttgactggtgggaagcagtccagccaagtacccaacactttaggaactgacaggtcctgctcaggtcctgccaggtcttcctgtgtgaccttgggcaagccagttaatctgtctgtcttgtgtctcagttttctattgtgaggatagaattaacacataattcactgggttgtttttttcctacataaccaaaataaggtagttttgagtttagatgcataagacccacagagcccttggagccatggctggcacacacccattctctttgttactctgctactgcttctaatatgaataaggtcaagatgaattcagctttaaagaaatgcctccttagaataaagcctcttcttggataaacagttgtcaggacatttattctttctgcgggattccagctttgaaaacggtgagcacattctagcactactgagggttgtcccaatggtggccctgctctcacacacgggtcttctctgacacccaggaacacccagcaggctcctgcagtcaacctgttaggttccctcatatacaacatctgatcttccaacgtaatgccttcatgtgttgtttacatttccaagtggaagccacatatttcttgtctgttctgcacactgaagtgtgtgcaagcacgtgctgtttatctttggtgctacagcagcatggtagagcagtgcattttttttaagaaaaatttctttagatatgaagggcctctcctatcagttgggagtaaactctgtatgtgtcagaagtgtgtacgtactggcttgtggggagtgaagagggctgagtcgggtgtggaacctctccaggaagaacaaagtgccaggtctgtgcttttgaacttatagacagactggggcaggagagatgctaagcagttatgagcaagagactctttcagaggctcagggttggattcccagctccgggacagcagctcaacaccatctgtagctccagtttcaggcagttcagtgccaccttctagactttgtaggtaccaggtacacatatagtgcacagatatacatgcaggcaaaacacagtgcatgtaaaatcagtaactaaaatagaataaagttgtagataggcaagtgagtctatgtgtggttcctctggcaaatctaaatttgttttatatacttggttatttggaggtatgtgacggattataacaattccagatactttgttcatgcttcagggtatgcatccctgtgaggagcaagaacaccttttcccacactagtgccaaagtagtgttgattcattgtattagcaactgtttagggtcactgcatcaaagacttgattgttgcagatacatgtcacaaccttggtgagtacagaattctgtgcactagagactagtgctccatcccatgggctgtctttactattggagcgcagatgaggatcttgcagctggtttttcaccttggacttgattacctgtgagtgtgtgcacatgtgctgatggagctcctcatgctgagcgtgtagcgccctggcctccattgacactatacattattaacagctcaatgttctgccaccaattccaagcttttctgtttcctttattactattttttacaagaatctttgttttaaaaactgttgtaaatacttttcatgttgttggagtatttatcactgattgtaaaatgaataaaatgataattgtctatatgtttgaggttttggtttttgggttttgttgttgttttgttttgttttttgttttttgtttttttgttttgttttgtttttcccctcatgctggggcttctcctgtctttgtaaatcacctatagattattacttgtcctcctcttgttttcttctctgcttttctttatcagaactttagtgttttatggatttgagatttacatcgtggtattttgggctgtgtatacatagtgaggtggttactatagtcaagcaaattaacatatatttgcttccacagttacttattgtgacaagggcagcaaaaaaaaaaatcatcttggtaaaaaatactctagacttggcctgtgcacctgtgtcaatgcatctctcccccagcgtcgccttatttcctgtcatctctgtagttttggtcttttgcagaattctacatatataagtgagattttataatacttctttgtctgctctaattcacttgggaagatgtcctccaggggccctgttgtggcgaaggttaggatctaggtaccagtttcttctctggtttcatgaactgtgagttaaagagccctgggtacaatatcagtgcagcacatcagactatgacatttagttgatgagaccttgatgtagtagaataacactttttctgagccagcctgggtgagctgggtggtgcacctacaggttgggaggctggctaggtgcctgcctcggcttctggagtgcttcacagccaaggtctttaatatagtttgatgttttaagatgtagaattcagatggactaacttaactgcattgatgtacaaaacttaaaactctgaaatgctactaacccacattgtttccatattctgcctacctgcctgcctgccttccttccttccttcctttttcaaaggattaaggcagaaaatggagcttgtgtcctggacttaccaagaagctattcagtctgaagaaaatgtttttaaacagactcttttttttttaaaacagaccacttttcagaactctgaaaggcatctgtggatttaaagtcccctctcacatttctaggaaggagcagcgggtggacactcttgagagttgaggtttccttcaacagataggaacgctttctcttgagttcatgttgtccaaggctgtagccagctgcttttggaaataatgagtttcctgctgctgtaatgatgcaggcatgtgcttcttcaacctatttcaaagatattttccacaatgataggcaagttggataaatacctagtggggcagactccacgggcagggtgtggttggggccgtgtccttggcatgctggtgatgttccacaatgtcctctttacttatacgtggaattacagggtaagggctgtggccatagtgaatctacctaagttcctgtaaagaaagcaaaagattagaaacctgttgttatctgggtgtggtggtgatgcctttaatcctaactctcaagaggctgaggcaggcggttctctctggatccagtcttctcttcatgagttagttctaggccagccagacctacccagcaagactctgactcaaagaagaagaaaagaaagctgattttttaattttattttatttttgtatgaaggtccaggatgagtattatcttctgtaaactacttgggaccagagtgttttggatttcttttctggatttagaatgctcatacacatatgagagatccttgggcactgtnnnnnnnnnnnnnnnnnnnnnnnnnnnnnnnnnnnnnnnnnnnnnnnnnnnnnnnnnnnnnnnnnnnnnnnnnnnnnnnnnnnnnnnnnnnnnnnnnnnnnnnnnnnnnnnnnnnnnnnnnnnnnnnnnnnnnnnnnnnnnnnnnnnnnnnnncttccatagtcactgaagtttacacaaggaagattgatgccaaggaccagtcctgacttggagagggattctgagagaaggggtgtccagaagcctcaacacaaatgacttgaagtcaaattgtgggctacaacctgatggcctatgttctgctcaagacagctttccaaattgctctcttgctcttgctcatgcttgcacacccctcaccccacccccacccccaccatccgtccagtgttcgggtttttcactattctaaaaactctctggatacttcctgtcctgcagatcaaaaaatgcagtcttttattttacctatcaattcagtctttaccccaggttcccttttgaccatcctatgaatcagcatcccatgacatcagccccttgattcttagaaagagacagcatgcacaagcacagccaatgagatagctgggtgggaccacaccctgaaatcattaccattctgaccacgcctggacctaaattaggtcagccccaggctgaccttgaactcaggacccacctgcctttgtaagcataaacaaaaaaaaattacctgggtgggctcatgccttatgatcgatcagcagtccctcagtctcttatctccttccttagtatcttcctgacaactggctcacagttcagctatctctgttcctaaagatctgtgaagctccttatataattcatattgtctccttatattttgcatagttgagcaataataaggtttttaactcatgttttcagagttctctcccacagcctcaagggctgtcctgaaggtcatagtattccaccattttgctgagatattagactcaccctcacctcctggacacatgctgtctctgattatcatggagtctttaaccttgatagagaggacattccttgaaggaagaacatgaaaatatgtacactattatacaaacaagccttatgcctacagcaaccatcaacactcatggaggcccatgccctgctggctctgctccaggggcaaggaccatgtcatgctgtcccttacacatggccaagcaggacttggtggattgacattatataatgtcagcggcaaggaccatgtcatgctgtcccttacacatggccaagcaggacttggtggattgacattatatagtgtcttaaagacggttactgttgaggttctccacactaggtggttggaaaaaataagtgctttatttatttatttatttatttatttatagataaggttttatcatgtagtctggcctggtctcctaactaagtgctggggattactggtgttggctagcatatctggtccccatctcccccaggactttgattctgttgtaaccagatttcaccaaggaacacttcattttagtgattcacttttcttttgaaattcggtaccatccatatgagagttcaaaaaacggaggctttaattcttaggcttgaacatactttgcctgtttcacagtgaacactgcatcttgtattagttatgaaaaacatgaagatcatatgagacacggtgttcgtgtaatctcatgctgggtaattacaagttttaattgctgcctcagaactttacattctcctaaagtctttttgaaagtgtaaacatcgaaattcttaaaaaaaaaaacaaacaaaaaacaaaaaaaaaaaaaaacgtgtatatggcagctgtgcagtggtcaaaattaagtggttgccatgattctaaagcccttccattgtgtctgttccatatgtgtggcagtaatcctacagacccacagttgcactctgtcagacccttgcagaggctgccagggtaggcagctgtgtgtggtatgctcgggtggacagctgcaggcaagatggcctgagaggagctgcgcaaggcagagcactactgcagaaggcttgactggtcagtggaatgccaggcaacatcaagacaggcatctcccccagtgtttccaagggaccttcccaaggtcactgtgcatatgcctgagacagttgttagggggtgagtgactctgctcacagagaagacttccaggagactctgctatcctatagactactgatccttttgatatgaggagtcttgagccagtagaactaagggtccctctgatacacagaaaagatttttattaacttggagcaagaaatatttttaaaggcacagggcaaaccagttgaacatatttttcaattgactttattacacagccgtttacttagactttattatatgtatgtgtatgtggaggatggaggcctctctccttccaccatgggagttacagggattaaaatcaagtggttaggcttggcggtggtgctgccacccattgagccatcccgaaacaatttttgaattatgcaaaatgtatacaacagagtaaagtgaaaaaactacaagtcaaagaataatggtaaagtgcatcatgtatgagtactattttttaaaaagatttatttatttattagtatatgtaaatacactgtagctgtcttcagacactccagaagagggcgtcagatctcattacagatggttgtgagccaccatgtggttgctgggaattgatctcaggacctttggaagagcagtcagtgatcttaaccactgagccatctctccagcccaatgtatgagtactgttgattagctgcactgtcaatactatagacatcaatgctgataccggtaaagaagatttagccaagtttggtagtacatgtctgggcttctagtactagatagctaaggcaggaggattgtgagtttcaggtcaatttccagagtgtgagttcctgggctatatactaagaccctgcctcaaaacaaatgagagaaaagaaagaatatctatcctgtaatacctctgagagtgtttacatttacatggtgatgataaatatttatagctggtaaaattaaaagttgatttgtccccctcctcaaacaacttggagaatttagtgtatcaaatgtatatgagtgatgccatgccttagggagtggggaaggctatattctgcccataaacacagagctgcgtgtttccaactgcatagataccatccaccttctgctaggtttgcctgctgtgtccctcagacccagtgtcaggacgatccctcaaaattgtgtgccctgcacacaatcacgtgtgtgaactaaaccacaaagactgctggggaaggttaagagagaaggagtcagaagagccaccatggttgtgagaagaaattacagactaaaaagatcctgcagagggacaggacaatggcttaggctgtggtctgcagcacagggaaataaaatccttctgaggaacctgggtattaagtaacacatagcctggtggtttctgcaccaaatcctgcagaactgaactgggaagagctgttgctccccacgagggcttgtgggggaagaatgggctgtgcttcgccttttcagctcctgtgtaccctagaatgagggaagagaagaggtgggttagggttcacattcgacagcagcatcccgctcatggacagtaccctgcgcctgtcctctgagcttcactcaggatccaggtgtctcgggatgaagtaagactgtgagatgatgtcactgctgctatggttttctaggctttgctgctttgtggcgctgttgagtgccgccacaggtgatgcagaagtgattgggcacagcgctcctaactgctcagcctgtggcagacagttacacagacctcccctaaattacatgtcctcagtcatggctgatgccagaatcttcatgcagttgtgcctgtgtagggattaccggtccatctgcatctcctcagccctggtgggaattcatggtgtcccaatgctgctgtgttgaattagcccttctcacagcggggtacagttggcctcctcacctccacccccagagactcaaggatccagggaaaggtggaggaatttactgtttagtagggtttaaaggaaagggcatgttgtctgcttttgagacactgtcatattttatatggtcaccaactcccgctcctgtttttgccctttacacatgccattagcaaaaccatgaaatgcagacttatcagcaaggactttttatttggctttatataaaatattaggaataaaatggtcaggacagggaggcttcttagtaagttcagccaagtgtgtggggctgtgagagctggcctcaggcagcggcagaaccactgaacagcaggacagcaggactggaaggtaaaatccacccttcagtaggaccacggaggacaggaagcccttagctgaggtcaggttgtaacgtacaggttgttagggttgtatgttgggatgttctcttccagctggtggtttggttttgggagatggaaccccaggagatgggcctagttggaggaagtgggtcaccaggggtaggtttataaaaccacagggcttctggcccaatctctgactatcacatcccttccatggaacaaggagtcctagcctcaaaccacacccatcctcccctgccatgggcacaatgcaccaggagtccttcttgccctaaatttctaaatgctgctgatttttgttgtttatgtatgtgcatgtggtgtgtgtgtgtgtgtgtgtgtgtgcacacacgtgtgcacacgcgcactgagctgacactgagctgatgtctgatatctttcacaactgctctctttgttatttcctgaggtaggatctcctgctgaacctagatgtcactaattccataattcttcctagtctagctagtcatccaacatgtaattcctagggctgggattacaaacttctgccatgcctgtcccttactatgtgagtcctgagaacctgaactctgctgggcatgtttataaggcatcacttcaccccctgagccgattccccagcccctaacctgtttctgtcaggtatttcgttccaacaatgacaaaagacaggtaagtagtgggcagagtgcttagcatgagctgtcatgtgtagtccctagcaccaaacataatgagtcttgggtatattatacatgtattctgcatttccatgaagtacatgagtggatacatttacatacctggtgcctgtctgcatacatgtgtaaagattctgcaattattgtgtgcactcatagtattaatcttttggattggctctagagtagaatatgaatctgctgtagaaggttttgctatgccacacatacattgcaaagagtcaggttgccttttgaaagtagctagtgagaaagtgccctggtgtccctgcctttggtctggactagtgtgatattgtacatgtgatcatgttccactataacacattagagtccccgaaaggtgtggtgccacactaattgatgttgaggtcatggagccactagggaattcaaggcagcaccatttctttgctgtgctcctggacatttaatttactgtgcattattgaatgggagattggaaaggctaaaacttggctgatgtttttcacttaggcattaaataaaattaaacatgaaaactggagatatcccactccctgtgcagtctgtcttttatggtagtgtccaggcttatttggagctcctgggctcaaatgagtctatttgattcacccaagtagctgggagtgtatatgcatgccgctgcgcctggctggatgtcgtttttatcacttatttttagtggtttaaaaggagttaaggggtcagagaaatgggcgataaatgggcgcttgctgcttctacatgatgacctgtgttcagatcccaaaacccacacagaaaaactgtgcatcaccgtgtctacaatttcagcatagatgaagggcaaagcaagagggtcactcaggctttctggccaccagattagccccaggcttagtgagagagtctgttccaagagaagacagcagacagtgttagaacaggatatctgaggtttttttttttcctcacctggcctctgatacacctgcatatacacatgtaatgccctccaaacctccactgaatcttaaaaatacgtaagccaaaagacataaaccgtgcaggtactttaactgatgtcctggtcctataaaatctatgacaatataataaccatggtcagctgttcctttagacggggcagaatagccatgagtgtttcatatttttagatccctttaagagccctcggtggcctctcatgctgacttcattatgctcacttagcatccttttaataaacctggaaactgctgccattattcagacattagtgagaggaccactttagtgctgtagcactggattgagacgctgatttatatttttgcgttattttaggaacatttcctagtgctctgggaggctcatattgcttcccgttagctaaactcaggcaaggaatgtgcaggaatccgataatgaagtggggttgagggtattttcaaagatctttttgttaatgaaaactcttaaaacgtttcaacaatagagaaaatggtggactccctcccctcccccgaaccccttactgagtttctcagagccctctctgccagttgttctacagagtcctgcatggtaggaaggtgcttgctgttgtgtggccactgctgcttgtataacagctggtctggactgagatgggctatcaataccacccctgaggctgcccctacttggagctatcagggaactgttctttggcctgtccttctaaatacctagatattttccaaggctatatctgtggggtcccttgtttcttcttctttttctttttctttttcttttctttggtttttcaagacagggtttctctgtatagccctggctgtcctggaactcactttgtagatcaggctggcctcgaactcagaaatccacctgcctctgcctcctgagtgctggcatgtgccaccatgcccggcttgtttcttcttttagtaagttgttatttttttaagtttcagtctgaccccttgcagccactgtgagtagggaacacccccccccccacacacacacactaggaggacccagcagggatgaattcccaccagttaatactatatgtgtttgctaatacgatgatactaattcatttgctgtctttctttttgtgatgttgagggttgaacccatgactttgtgcatagcaggtgagcgctttactcttcagttacacctcagccctcatttactatcttaatgtaatgctcattctttaaaaatgaatataacatcctaccgagaacataaaagaaataggaggaaaataccttgtgataaaatattgcctccccctctgtttctagtcctagtggttagatttttatcagactatcctgcaagcagatgcaaaagaatccgctctaaacacatgcaggcatgcacatgtgagagtgtgaggagtgttgtccctggctacatcacagatcctagaagttacgaggaggtccgtcctaaccgagcccatagaccactaatgtccatctcctcccaccactcttgaccatgtctttgccctggagcatccagtgccccctgccctgtgtcccttcttctgtgtgttccactaagtttgtgagccccccaaaacgtttccgtcttctgttcctgactctaacctcagcacctagaacagagcccagagctctgggaggttctgttggataaataaatccgtttctctgttgctctctgttgctctctgactctggagcagcatgggtttgtgaatggctgtctcgctgacagttgtctcccagacattctgtctgctgggtctctgagcctcactcactccttgtgttgtggagtgaggtagtgtgcatgaagcgctctgtggcttcagaacccctcactaggcagcacgtccactcagtactgtttcagttacgtcataagacacatgcagaggcagtcagcatgaagactggaggagaggttggttcttgtgggcaacgagtcacgtggctatctggaaatatctgttggtactgtaaattctcctcagtactaattctttaaagatagaaatacatttttggttgatgccatcataagcctatctgctgaaatggcttcttgatgtaaagtctcaaaaagcaatagaaatccttgaggagactgcatagtttcagtttgagtttccctaagtcacctaggcagcttgctcatgctatcctcctgcctcagcctctcgaatggctggaactgctggtgcccaccatagtgccgggctggaccacaggctgcagtgcagcaactcactctaagatgccggacacagaaagagaggagtatagaaatgctttgaggaagaagaggagccacttacaaaaaacacagcaatggactggaggccacctttgtggtaacagtttgcccacttccctgggagtggtggttggaaaatgctagtcagcagctccgtgccacagtattttagcaacagagaacacacagcgtgccatctcatcagaagacaatccagtctgctcttctcaagttaggaaattaacaaagaaatggtgtcctggattgacaacccaaagccactgaggctccgccatcactatttctgtctcctggtctctgagtggaaggacgtgacagtccatgtgtgtgatatacttctcaggtcctaagaaacacaccatattgatcgctaaagtccttcttgttcacaggactattttcagtagatggcttgtcgatttactttatgcctttctgtgctggagaccaaacccaaggccttgtgtgtgccaggcaggtgctgtgccactgagctgcacttccagcccttggttttagaggccaggtttcattgtgtagcttaggttacggcaaacacatgctcctcctgtgctggggttttgtgcaccgctgcacccagcagacacttgttctttgctggattctactcggcgttgttctcaggaaaactttcaagggaagctcgcaggagctgattccattgtgctggcacccatctttgcatgcatctgttgctcgctgccgccatctcagctttgcaaagtttccagccctccgtgttgcagtagtcaacactgtgtgaagagtaaccagtgccgatcacaggagttgcaggatcaggaaggtgtctcatgccagggctgtcagttctgagtcgtgttctcttaaggcagttaaaaaaagtctccccccaccccaccccccaccccgtttgtgttttgtttttggtctacttgggctgccttctattttgaaattttttatttttgctcttttagtaaaacctggtcagtaatccaaataagctcattctttaatgctataattataaaattacatttttagaaagcacttccacatgttgtcagctgaggctaagaaggaacgtacccgccacggggacttgtgtagagtaggtgtgccgtagatacttgtagggtgtgcaggtggtgcgctgatgtaatggactgaaaggagtgaagacagctactctctcttggtccctcaaaacatattctctcttggtttcctgtatcgtttatgggtcttaggaggagaagtacatgctaagctagaaaagaggtgttgtatgtgagagagcgggtataagggtagggtaggttaatgttgggagtgtgacacactggctctgtatcattttttgacactgattggtaagtctggnnnnnnnnnnnnnnnnnnnnactgcatagtttcagtttgagtttccctaagtcacctaggcagcttgctcatgctatcctcctgcctcagcctctcgaatggctggaactgctggtgcccaccatagtgccgggctggaccacaggctgcagtgcagcaactcactctaagatgccggacacagaaagagaggagtatagaaatgctttgaggaagaagaggagccacttacaaaaaacacagcaatggactggaggccacctttgtggtaacagtttgcccacttccctgggagtggtggttggaaaatgctagtcagcagctccgtgccacagtattttagcaacagagaacacacagcgtgccatctcatcagaagacaatccagtctgctcttctcaagttaggaaattaacaaagaaatggtgtcctggattgacaacccaaagccactgaggctccgccatcactatttctgtctcctggtctctgagtggaaggacgtgacagtccatgtgtgtgatatacttctcaggtcctaagaaacacaccatattgatcgctaaagtccttcttgttcacaggactattttcagtagatggcttgtcgatttactttatgcctttctgtgctggagaccaaacccaaggccttgtgtctgctgggtgcagcggtgcacaaaaccccagcacaggaggagcatgtgtttgccgtaacctaagctacacaatgaaacctggcctctaaaaccaaggactggaagtgcagctcagtggcacagcacctgcctggcacatttttagaaagcacttccacatgttgtcagctgaggctaagaaggaacgtacccgccacggggacttgtgtagagtaggtgtgccgtagatacttgtagggtgtgcaggtggtgcgctgatgtaatggaccgaaaggagtgaagacagctactctctcttggtccctcaaaacatattctctcttggtttcctgtatcgtttatgggtcttaggaggagaagtacatgctaagctagaaaagaggtgttgtatgtgagagagcgggtataagggtagggtaggttaatgttgggagtgtgacacactggctctgtatcattttttgacactgattggtaagtctggctggttagccaggtctggtatcttgctgtcttcacgttgccagtggtaggttacagatgcttgtgaccatactcggcttttgtgcggatgcctgggattcaaactcagaccctcatgctagtgtgacacagtctgttcactaagcctggaagaatgggctttcaacaagaaagagatggaagctgaaaaggattattagagcagtatagtgtcagctcctatgcccgtgctggtcagtgcatcacaagtgccccgcaggcacacaacagtgtttcctggctattagggagactggaagtctgtgtctccgtggttgaatgctccgttgttatcatgctgcagtagatatgccaccaccaaattagaaacaggaaaagcagcagcaaaaagacaaaggctctgtatagccccaaagacggggtaaaggcacgttcctgcatagtacatttctgaggaaaataagtcagttaatcagtggggaaacaactttttcgtttggctgtaatattcccctgggatggcttcatgaattcaataaaacaaaactaaagaaaaccctcttctgtttgtgggaatatataattaacccatagaaattagtgccatccagtaattactgaagaaagaggattaaatgttgggatgaataaaaataacctctgatattgttctccctggaagaagattgtaagggctgtcagtcattctgcatgagggtctggattgttactggctaggttgggaacagcactttctggttccctattacataagctcagcagagcatgaaggggtgggtgttgctttccccagttctcagagcatgtggggtgaggcggagtaggacagagggaagttacagtcacctggacgatgtatttagtgtgtatctaagttgtgctgcaatgatctttatacctttgaagttttctttcttgctgaagagaaagctcggcagctaagagcacaaactgttgcagaggacccaggtttggttcccagcactcagatcaggagactcaacagccacctgtctgtcacaccagctctgtggaatccaaagcctctggcctctgtgggcatcttcattcacatatgttgtcccctccccatgctcagagccccccccccacccctcccacatatacacacatactttttaaaatgtggtaaatctttaaaaaatatttctagttatgacccgattagttgagttctgctaggggcttgaaacaagacctctagttttgatggaggacatctgacccaacccgtctctctgcctttgacggctgtggttatttccccactgtaagttctgaacatgcaaaaatgagtccactcccattcctggcatcaaggagcctgctttagagaaccgtggagataagtatgctatgagggaacatgcgtgtgcacgcacacgcatgcatactcgcgtgcacacacacacacacacacacggtgggagaggacattatgacattagtgatagaacatctctggtgtaaggaacaacagaggagagacataaacttagggaattggccactttagggatcgcagcagcaagtcacgaggtgctcacacggagaggtagagcttgaggccactcccaggaaatgtcgggcaagcttctgtgcctgaacatgaagctgtgttggctctgccaagctttgggagacctcagagttcctcagctttctccactgctctggtgaatgtgaacagccgcttcagctcttgcccgtccatttagagtgctgaggggttgacattctctctctccagtttgacagcgttttagagaaagacatcccaaagtccgcttgactcaggtttgagttccttaaacttgaaaaagcaccccacacttccagtctgttggtcctgatctccctgtctacctgtctaggtctctgtgtcgtacagctccttagtaacattttcattttcttaatgctcttccccatttccatccatgtcctacagatgtggcccgcttagtccccatcctgatacctctcctcaggtatacctttggcagacacactatgtgttttcaaaagctggcatttacaaaagatatgcatgtctaagaaactagattatctttgtagagtcagagcactagagctgagcattaacattttgttacagtctggaggagtgaaggtgctggggcagctgctgtggtccagctgccccacagtcccgccctcccctgcaagctgccgggcagcccggaagctgttcccagagggctggtctgctgtattgctcagggttgtgtggtgttcacgctttaagggattaggcccaacaaacaaactagaaactacatagtgacaatcagtctttattaccagaaaaactgctgggagtctttttgaagagaagtacctttgtttaggctcagatgtgccttacatagaatttcattagcagggatggagtgcaggtaaaatatagctgcacaattttataatgcctttgtatttgtcaaaatattggttgtcagaagaaattcttacacattagcaaattgccaaagtatggctatgtactgcactctgcacagatgagccctctctgctcttcttcctatagcttacttttcactggcgattagtctcccttccattcgtatgtgcacccaagctctgtctccaacctctcctgttcattttcttctggttataatggaaatccatgacagttccctgtgaggggattcacaaccatgaattgcttgaatgcactgttcttaagtctcccatgacactttgagatggttaccttaatgcagttaggctaaaaatgtgccacataatgataatactttattatcagataacaacaagctgtagcgtgctaaaaccacgtgtgtagtattgaaatgaaatatactaaaaacgggtaacagagcaagtcatgtagattatggccccagtgcttattgttaaattttcctgtctgtttttaggcaaaacccacccatgtgtttctgcaagcttcagcactaaggaaaaataaaagttgcttttatagttttaagtatgctgtttaatgatcagacattgccgatataagactagtatataaaagaaaattatgtcttagtgttttctgcaccaacagacatgcattgtatttcattcactttacacgtcataatttgtggactcgtttagttaaatggctttggttcgtaacattgaatattctggaacatgcagtctgcattttgaataatgggcttagaaatttcactttgagaggcagcctagccatgtaccgagtgactgctttataactgggtagtctgctcagatgtggcccagaagcatccagttcatgcggcacagcttttcctaagcagcctgggaagactggagttttgctctgaaatcaacttactgctttgtagcatagcctggggtgcaaaggagtgctgagagacatctctatgtgcttcagtgtttcaaagtggctttttagagaaaaattaaacacattacacagaaattcagagaacttcacaagttcccccacacaggagcaactataaattctgaaaaatatgtcctacttctggaacgttctttggaagggtgttaatgctgttcaaagctttttcctgtgttctttgtacaattattagtctctggagaaaggtatgtgaaagacatagtttctaattaagaaacaaaggccagtattaacttgtctaaggggagtccagtttcataactgattattttgggtgtgaagaaagtccgtcctgtggattcttgctgtcaggagtgttccatttgttagatgttgatgcttttatgaccactgattttgtaagtaaacctcagtctgttggaaaaagcagtcaggcgctacaaacacgctattccctccgttcctgttcttagttttggatgaacagaacacattggggccaaggggtcaatagtgaaatcttaaggtgtgtgctgccctggttatgatctgatagccatagagtcattgtgcactatttcagcaatgctgtattgtgtttatacacacatcacaaccttctgttgactttgccccaggcgctgttaatttgcagctggttaacagaatgccacagaaatgacttatttttcctttccttgcttgtggtcatgagcagtctcttttcagcatctcaggaaacaggacccacctttacccagtgaattaacgtgtttgacctgatggttgaaggtttcattctgactccagtgagggatttttatgccaggattacatctttattttcttttcttaagttatagtgtgttggaaacatggactttacctaaaattagtttagtggagacattattatctttgtgcagttatgggctgtgggtttaaaatatgctctactataaatgaacagcaagtgggttcacctgaactcatagaagggaagagggagaggtagtgaggagaaagagagaaaacaggactgactgaatgaatgcgtgcatgcatgaatgaacaccaactggggatagaacccaggttctagtccatgctacatcagcactgcactcctggccacacccctaacccctcacccctgtctgtcctcctcatgtataccccataaaaagacatcagcgaaggactgagtttcttggagagaagcagctactgcctgttctgtcattcccaccagaggagcactaatatctccaaaaagccccgggaagatgtgtgtggagggggctcatcagctctgtctatgtgaagctttgtttccagtggggcctgttttaaaagagtggatgtcccagaaaatgtgctaagaagttgagaacatcacaggctgtgtggctgcatatagcatttgaagacaagccagctgccaactgttgcaaaatggctgtgttcctccgtgtctagaatttccttctgagatgcttttagaagcttctttcttctcgtctgtctttccgtatttgatggtggctttggagttagttgataagtttccaaggcaggcttcataaatcaataccatcctgctgcagagaagccccccgccccccttttcctgtgagttggagaaggaagctttgagagactgcggttttacttaggacttttatctcaggtccctgtccccatggttagatgaaaaacatgaaaactgcggttggtagtcaggaagtttaatgttaacgtcattatagctacacagtcttggatgcttattttgaaattcatactaacagtggataaagccccacttctgcacttccacatgtaaactagcagttgtagaacttgagattgggaaccaaggcaatgagaacagaaacagaactggggttggaatttggagagaataattaagatgtgttcannnnnnnnnnnnnnnnnnnnnnnnnnnnnnnnnnnnnnnnnnnnnnnnnnnnnnnnnnnnnnnnnnnnnnnnnnnnnnnnnnnnnnnnnnnnnnnnnnnnnnnnnnnnnnnnnnnnnnnnnnnnnnnnnnnnnnnnnnnnnnnnnnnnnnnnnnnnnnnnnnnnnnnnnnnnnnnnnnnnnnnnnnnnnnnnnnnnnnnnnnnnnnnnnnnnnnnnnnnnnnnnnnnnnnnnnnnnnnnnnnnnnnnnnnnnnnnnnnnnnnnnnnnnnnnnnnnnnnnnnnnnnnnnnnnnnnnnnnnnnnnnnnnnnnnnnnnnnnnnnnnnnnnnnnnnnnnnnnnnnnnnnnnnnnnnnnnnnnnnnnnnnnnnnnnnnnnnnnnnnnnnnnnnnnnnnnnnnnnnnnnnnnnnnnnnnnnnnnnnnnnnnnnnnnnnnnnnnnnctgtgtgtatgtgtgtttctgtgtgtgtctgtgtgtatttgtgtgtgtatgtctatgtgtctgtgtgtatgtatgtgtatctctgtgtgtatgtgtgtctctgtgtgtgtgtgtgtctgtgtgtatgtatgtgtgtgtatgtgtgtctctgtgtgtgtgtgtgtatttgtgtgtgtatgtctgtgtgtctgtgtgtatgtatgagtgtatgtatgtttctctgtgtgtacgtgtttgtgtatgtatgtctctgtgattgtttgtagtgttagtacattgaaagcaaaataaatgatctgttagtactgaagtagccggttaggctgcagtgcattcatacgatgggaacatttgtgttaggctagaccaacaatataggagggagtctataaaattctattaaggaaagggaagatccagagaaaaatatgccatacgatgttttaatatatctccaagtcatattttaaaaacacagaccatttccctatgttatttaaggattaagtctaattgttttgttgttgtttatctgcatctttgtgtgtggatgtacgcacatgagtgcagaggcctcagaggccagacaagggcatcagagaccctgaagctggagttgcagacaattgtgagctgctggaaatggtttatgggagcagagctcaggaactttggacgaacaatatgtgttcttagttgctgagccatctctcctcccccacccctgttgtttcctcattgctacattggttgtgaagtaaagtgataaagtcagataaagagacagttatttagtcatatagttttatgtgtatttgtgttttggtgtaatagatatataaatgaatatatgcatataagaattatcagaatattaatggagactgtcttcaatattggtaatatagaaagatgtttatatttttcctcatttccttctctttgaattttcgaagaacccatagttatataatgctaaagaaaataaagctttgtggatcaagggatgaaagatccattatggatgattgtcggttctttgctgtatataaaacaaacaaaaaccagttctgtgtctacagtgttaggagactcagaaaatatccatgggcctccaatagtaaggtggtattcaattcataaagttaaatattccttttgtggtgaatctctcaaacatcaccagttcgtgtcaaaaatcaaggtagcttagtgataccaaacctttgtttataaagcacacagataacagcctaacaatagaagggagactggagatcgacccacacaaaaatggcagtcagaaagaaagaatgcaaacacatggcacaaaagcatgttactgtgtgttattaacacaaagaagtacctgtgtagaaaatgggcgagaaaaaccagcgatgaagactgtaaatggccaataagcacagtgatgccaacatgaatggaacagtagttacccataattgatgataactgagcagaagctgggatgtatcctacacacatgcatacatgctcagtcccaggaattcctttcctgggggcatatcatgacatggtgaataagaaacttgtttacagtgcaacctgtttgtaatgtaatgaagggaaagtaaaatgtctaaatataagatgacatcatgtttctttggttgtttttgtttttgtttttgtttttggttttttcccagactagcctcaattgaactcatagagatctgcctgtctctgtcttctaagggctaggactagggtgtgccaccacaccaagcgatgacgacattatgttaagagctacccaattgagccctatgccataacaaatcacaaaataattatgtatgcatatggaaaatttagtgacttaatgtaatgtttaaaaacaattgaaatcagtaattggttaataatatgcatatatgatttttattaaaattatttgtaggacattttataagaaatgtctagatgactacatatcaaaatttagtaatttggtgactcagacagagtcatacacccatagccaaacagtggatggagcttggggactttttatagaagaataggagggagactgtagcccctaaggtgataggaactccacaggaagaccaacagaatcacctaacctggacccttggggctctcagagtctgaactaccaaccgaagaacttacacaggctggacctaggtctccccgcacatatgtagctgatatgcagctcagtcttcatgtggatcccataactggagcagggataccccaaaagctgttgcctgtctgtgggatatgttcttctagctggactgccttctctggcctcagtgggagatgaagcacctagccccacagagacttaatgtgctagggtgggggaacacccaggggagtccctaccaactcagaggagaatgggagggggggtaaggggaaggattgtgggagtgaccaggaggggggcagtgtgtgggatgtaaagtgaataagtataataataataattaataataatagtataattagtgagttggattgggaagttagaaagatgaccaagtttgattcccaatacccatatcaagcagcttacagctacctgcaactgcattcctaagagatgcaagccctcctagggctcaggaactcattcaggaacacgcacaaaggcataaataaattaaatccacctttaacaaaaatcctgtgatgcaggctactgaagtgactcaggatcaaagtgtttgctgcgcagacctaggaagtaagttcagttcctgataccacgtggcaggaaagaagcggccctgaaagttgtcttctgaccgccacacgcctgccatggtgtgtgggggtgtgggccaagtgtacagtagtaataatcgtgattaagaattgtgaataacaacaacaataatattcacagtgagtatttctggctgatttttcccccttttttgacatagtttgatcattctgagaaaactccaaacccttaataactatgctgccaatattcaaataaatacatttcagaatttatagatgtccctctcataattagatttaaaaaaaaaccatcatttgatacattaagaaaaagctaaccttcagacacatagaaattttatattgaagaggaaatttagttactttaaaacatttattaggcacttgctgtgtgtcctttctccacttacattattctagctaagtgtttgtttatttgctaatttagtgactttatattggacatctgttgctatgttatagtcccaataaacagtccttttataggcaagaaaatagtctcataaatatagcctttggaaatcacacagctcgttaagtggaaagccgaggttaaatacagccagaatcatcaggattctctccctgagttgctgactcggggctaccatggttggtctggcagcagtcacccggctgtcagtaggaagagcagaagccaaaagaatgtgtatcctaattccaagctgattccagaatttggtagattcccagctactagcataacctagctacagagctctgcactaggccactaggcccagacttggggtttgctgacgatattttctgcatttcctgacactacctgagagtttttaagtcatgcaagtggacatcaggctacaggctcctttttcatttactcgacttaactgtcaaatgagaactgaaaagtatatattttttccaattgaacaatagtgtgccctgcatattaaagggtagagctgaacacaggaggcaggaacctgtaattatgtgcaaaatgttttcagttaagtctgttggcatgcacacaaatggcaaattgaggctgccctttggaatgcttacaacccaacacttcagaaactatttccagcattcggcagactctcttagaaattctggatcaagccagagagaaaagtggaaggcacttggttctttgagttatttaggaaaaggtttccacagagggtttaaaatgtgggactgtaggtgtagctgatagcagaatttagtctaatagagaaatgttggcacctccattaagctaatggcgtttgcagcatgaattggggcatgtgaggccggtggagccagcccagggttgaggtgccaacctcttctctctgggacatgaactgtgggttttctttgggtcttcctctagccatttcttggcttcaccttttcaataagtttgtaataaaccccgaaggctactgtgttttttaggtagggaattttaattcttacaaatttggtgtctggccgagttcctcagacttccgtctgtcactttctctgtcctcatttctcagagtcacactgttttctctgccccctttctctgctcctcactggaattcacttgagccagcacctgcagcttcctgcctccaaacagtgaaaggcacaggttcactcaccataacccatttgagcatcgttagttgcatcaaaggaatgcaaagcaataacaagggagtcctttgtcctccggggagcttatgtttttaaaatgcacacctcaggtgtgcaccagcttcgaccacactgttagcatgaggtatgaagacagtgcagcagcacttgagaggtggtgtgatctctgttataaggagcatttgggagaggctcacgtgtgagctctgcagccatcctgtgctcctgccattatcctggagggaggagagagggtcatctcctagaatgcttccctttgctggccttcacgtgccacatgtttcttttctgtctttagcaacatcatggcgcatggctttgattcttcctacctctttggaaaatgtgtctggacaggtataatacccatggccagagaacaagatgaatttttcaggaagaatgtaccagtcacagcaaaactccatgattagtttgtagtgtttgtagataaccacatctttgttgaatgtggtttgcaaggatgactaaggacgaaggttcaacactcaactctcagtaagatagtaaccaagatggttcctgtcccttggccctccaaactttatttctgagagtcaccttagggtcacaatgaaattgataaagagaatgaagaatttctttgtctcctatccaacctcctccacaggtttcctctcttctatttcccacagcacagtggggaaaaaaaaaatcaatgattctacattgacacctaccaccccaagttcagagtttacattggcgtccactcttaaatacacacaaatgcgaatgatgtcatctctctacccattgaatgtgaaagtcaagataatcactgcatgctatcatagattttttggcttgtgtgtgtgtgtgtgtgtgtgtatatatatatatatatatatatatatatatatatatatacatacatacatatagtatattggtatgacaaaggagtggccacacagatgatgaagtgctacagctgaaataaaggtgaaattaatgggagttaccacaaggttggcttagctcacaaaattcattcattaccttttaggaacttatctctcatgcagaatgagatagacctggtatttgttcagtaggatcttgtgagtcacagaagacaaagatcttttctctaatctaatttcctgcgtgcctttcaaaacagaaagttttgatccactaaacattattttggaatcctgattacgtacctggcattgtggcaaggagtaggtgccggagtcataggagtgcaggagacacattcatgcctccctaggagctaatgtctgggaggctgaccttaaaggagagtcaggatagtgtctgagaccttgcagccacagggctgaggactctcttgggtggcagggatgtaagtcagggagaaagctttctaaggcagctcatggccagccctgcaaacagcctctagaaccagatctgtcctttatggaaactgaataaatagtttcatagccagaatgggcagagcttgcccatcacccctctgtgcatgggagggagggatctgaggcatggctccacgtttcttggactctcatgtcaggcatgagctgtccctgggagcttagaaggcctggaaacttacttaaggacattatggagcccttatggagaggatattaaaagctcagtgctagattgtccaatattcagaggattaactatgacctcagtgagttattgaacttctctgagctcaattttgtcttctgtaaaatgaagataaaaaaaatccacctataatgagattctcctgcagacttccagggaaaatgtatgtaaaacacctgtggcatttctgggcttatgataaagagaccgctgggtctacagctgggtagcaactatgtagtaccacaggcttgatgtggccagagaggataatcattgttcatttgtttaaaatcaaaaatgcgaacatttcctctaactgctgatcttaaactcactatccatatattttagtctttcggtaggttaaatcttatattctaactattgttttgaatttattggcattgctttaatttgcattttttaagttttcagatttctgttaatgcacataaaacattactaaccatggttggcttcttcatcagacttgtagttcagatgtcaaaagtattattttgcaaaatgtttatatccaggggtgaaaatgctggcctagtatctttttttattttttattttttacttttttatttttttgctaccttatgtcacctccagcatctttgactttctgtaacttatgttttctacttggcagtgtttttccagagcaacttgtcatgggcatggcctgtgcctccacatctcaaagagcaaagcttccaatgtttaattcttcaatcaacacagcaagttttaggaaacagttctcttgtggtgtgagcaaagcacttgcgtggtttattcagaggttgctcaggaacacattgcctgtttcttgttctgtcggtacctctgctgccacattatttgtgtaatagtaacctcaggagaggttgtagtcctccaaaataggtaagccctatttctaaagccagctgaaaaaattagtttttaaataacactcatttatatatccatatccaccccaaaatactgaaggtaaaatttagcctgggtgcatccactctattggtagtagtaatagtagttaccatgcaccaggaaaaggaaggggggaaataaagaaaaaacatttttcttttgagaaaaaagataccagtgttaatgagcttttcatcaaaattggttttagtttttatttctcttggtttatctttgtctttgctctggactagggagagtaaaagccctttggagctcgtgtggacaaagagaaaaatctaaagttgcttttggaggaattgtcagaagtttacaaaagcaaaactacagactttatgaagttcctgtaaagtctggtatgagccccttcaaatacaaaggacagaggaaacatgggtggctccattcctaaaattcatcattgtcctaactgttttgggatggtgcccagaccttctttggggacatctggaggtgatgcttcctgtcacagaggcaggaagtgctgtactgcctacaggattgtctctcagagggcacagtcagttgctgcttaagagagtgctgtgttccaatgcaaagtgacaatcactgtgtgccatgccacgcaccatcttgtgcgttagggcagattcagaacaaaataaaatctgaccctggagccagtgtacacttgatcaggcaagtcatttgggactctgttttcaaaatcaagtttgcaagtgacagaaaattaactgttttaatcagaaagggaagtccaggtgttgctgcagccagaggctcccatgggcagcttttgccggcttcaagctgccccttttgccctgtgttctatgctccatttgtctttgcccttgaaatatcaagataacccagaagcccggcatttcctttcccatcactgagtcgagcagggcagagctgcttcccttaactgtgggaatccagaccttaggcctgacagtagctggcccagttggattttatgtcagtcgcagaagcaaccaccatgttcttggtgggcaggggtgcttgttttctggacacaggtcaagttccagctctggggctcggctgggtcaggaatcagaaagggcctgatgcaccaggtcagactgtgggaagctgttttcttagctgaggaggtgccaaggagaatagctggggtctagcagttgggatccaagagaagaacacagtgtcaaaacagaacatgacatagcacacactaggtgcaaagagggccgcactcattgaggatcagcagttcatagagaagatagatgtacttttggtttggctctcccaggagggtaacacccatcacttggtgtcagaattgatgatgtctcttgcagccccttgtgacccctcccatggaactttccagtggaacactgcaacactacataaaaaaaaaaaaaaaagactgtgcccttaagaccagcagaggagccaaaaaaaaaaaaaaaaaaccagaattcttgacttaaaataatgtcccattggaatggctggggagtggtgtaactgtagtccacctgtaagtaagtacgaggtacagatgcatgctgggatatttcctgcccacccagtcttgtttatgtttcataaatgattgctgagcacccactcatttccacgttttggagaaagttttcaaggagataaaccaagctacagaattgcttacaacatgagttcagccatctgtagacttcttaaaggtgccaaagcctagaaacaaatacacccagaagataagcagtcacttctgctctttatattttacctgcattttcgaacaaaacaaagaccacgcagctgtgaacctgtgaaaagatcagcctgcattagaagcctggaacattaggcttctacagggccgggtctagaaggcacggcaactgtcacaagtgaggttttagcctagaaaatctccatgtggacacacggaagcagtgacttgtgtattgaaataagaacttaggcgtccctgagaatctctggaaccattatcagtattgatccaggctttactttccacttggtaggtacctccctccttgcccctatccccaaacctgtcatcctttcttctctccgttgaggcactagctctcttctgtttctgtattttcctctagtagaccccatgatccacgtttgccatacatttatttagatttgacagatgtcaccccacaagctttctttcaaatctcctataataccttgtgataccacattataattcccaattaaaatcaggaagactgaccagagcatgtgggattgcaagttcaaggacagcctgggctacctcatgaggcctatctacagcctaactacatagtgggatcttgttagaaaagatgaaaagatactgcattgtggtctgaaaaatctcacccttgctgcctcacttctgaggaaaggcttgggcagagcaagcaggaaggtcgcatcctgctggaaattacatgcctaaccacccatggatgctttaaaacttgcaagagtttgcttcttagacacaaccaattctgttcagtctcataagcgacctccattcccgctaccttttataatggtggcatatgagggatgcaaaggccagttataggccagcctgggctacatagaccttgccttcaacacaaataaataatgaaataaaaccttttcatttaggctcgggttaagaaaccattcttagataatgttaaggagtctcattttgggattattgtctgcccccagactctgtgttctcacacctttctccttccccattatgtttttgaaagtgagcgctgagttttccattttcttaagaattaatcctctcccaggacaaagctcagtaagggtggagtgaccagcctcgaggaaataaagtcattcattctccaggaacattgtcctagcctctctggaaataattatgcgattcagttttcctgaaaattttactatagcatctgttttcacaattaagttggaattattaatggccttgggcatctgtgcccagcaaaatcatttaccattccagaaaccctcactgtggggtttcccttcctgcttattattatatcatggctgggcagcaggcgggaacaccgtctcactcacccagaagccagttgcttcttcagagttgcttcagaggtgcttcttgggcacctctgaaaccacagctgtttccccttcatgtgaattctgacccacagatcttgggaattcaggtgagtctggtgctgtggagcttagctgcaatcacagcacttgggaggctggtacaatagcgttctggagacacagattcgaaaccagtcatggcacagtagtgagacctcgtctcaaagccagacactggaaatgtcaaaccaacaagagccagtctgggtgaaaatttccgtaacacatgatcttggggcaagatcaccacatggtgctgtaacccactggactgtgggcgacagggcccagttgcgttcctgtcccttcctttcactgtggacagttgtatctgtggcatgtaatgcaagagaagaaggtgacctgacagccagtgctgccgaagggagatcagaaagagctgtgtaggagctcaagagcagatgttctcatcactgtggcctgggggctgaggggtcctcagtggagggctgggaccaagggaaggaaatggcttccctcgggatggagaatttgatcttttgacttccttcattccttatcacccgctccgatggctgaggctttcccctttccgtgcgttccttcttatctcttccggcaaacagaaatgtccgtgcaatggccctgagcttaatttacaaccccagggatggtccttgctgggacatgtttttttttgtttttagttggaatttttatttaacataatgttcactggacaaatactatttcccagttctctgggctgcacacaagtttaccggtcaggaagagggactttttccatgcttagtgttagttagtacacattgactgttataacagtaattattatcatcaacttaggaaacgatatgcttagtgatttttttttttaaatcacagatagttaaaccttccaatatcgctaatttcttagagttacggcagccacgtcatcacaaagacattgcttcccagaagtagttatcccctgggatatcacagttactgcatgggatagataagaattgtcacgtgtagcttataaactcatggatgctaattactgcttgttaagcacacatttaagccctgtgtctctgtgagctcagttatacaagtcagagtctatggaggaaaactgacttgaccctcaggcccccacatctgtatgcatgcacacacacacacacatgctcacacacatgaacagtacatacgtaatgaactacagagcatgcaagacgttttttgagatcagtactgtgtagatatacaaatgaaatggtacttaaatgagagagaggatgactgagaccagaaactccttaatcacctcactaacactgaggtgagatctgtcttgtttatagactgctgctgtggtaagttccgatgttccatggggaggtgtgtagggctgatcctgtctccattttgtaattgaggaaactggggcagaaaaagaacagtattccagtaaggcatttacagctgcctgtaaattcccatgagaggttggaaatcggaaagtgccatttgtgctggaggaatagcctagagaggtttggggcatctttaaagccaggcgtggtggtccacatctgcgggccccatgagagaatcaaaagttagagactgcctgagctacatggtgagacctggtctcaacaaaacaaaaagtgagaaagtaaactttaaacaagaaagaaactttttttttgagtgggaaaaacacagcccaatgagaaagagtcttgcaggcatttatagacccatctgataaaggaatactggaaaatattaaattattcataagttgcctgataactagtaaataaatgcatgacggaacatttagaatttggcacagcctttgagaaaagctattaaacaaatgtattgtgcgagaacaaaaggctttagtgaaatttttactcggataaattggatgacagacagctaaactcccaactaaagctacaaatgaacgtatcacagtgatctaattagtgagttatcttatagggccagttgactttaaaaattatattttgagggagcgaagaggcctggttcttggaggtgagacgctgctgagtggggcttgcttgctgcccctgggcagatggcatgtcctcggccacactctgatccccacagataacccttcggattgcttgcctgctgtttgaagaccgtgttgcaatctttagcctttattgggcaaattgatctcttaaagacattgtggtctggcagggccacttcttgttcattaggtctgaagtgtgttttaaatagctacattcaattagactcgccacctgagagcacgagaagaaaatgtgcctcttgcagaccacaggagcagggggaggctttgtgttggattgtggttaatctgccgtctgcacttcctggacagaaactgcttaagtaaagagcacgtgttggggtttcttccataaaaatcaaagttctgtgtgaagtaacagggcagtcacatattcatgactaaatttttcattctgagtggaaatcctgggagaagataatgcttattatctagagcctgtggttaaatattttcaaagacgcttataaaaattgggataggaggaataagagaaagaagctgccccatggggtggggacacctctctttggtgggatctttgagaaggctataataacctaaggctcaggtaatacccgggctaaaagtacacgcagagcgagcgcccacaccatagagggttaaggaattcaccgtctctcctacatttttaactgttaaggttttttgttctttaagtattctctatgcttcatgtcaattgttacacatttaaattttttttttcttaacttgtgtatcataaaatggaatctttttgaggagaagggaaacaaatactagataaccccctggatcatgtgatgtgactgtggagaggggccaacaggaagagcaggcctggccacagttttccaggaaggctttgaggatgaagggaatccgatctcagcagtcctgagggtgtgcagtctcccagggggattgtggagggctgtgggttaggggccttcaggaggaaagctgtgccttcaatggcttccttggaatttttattttctgtgtgtttttcctagaacatcactcttctttccacatgtggtaattgttgtcccttccttagccctctgccccaggcctgatgctggatcttcctgcggcatcctggcagtgctgttgagagaactccaaagggtcctcatggtcccacatgagttcatgttttcatggggtcacttacggattgcttcatgctctttctatggaccagatgagcagaaaatctccaccatcccctgtgtctgctaggggtgtgtctcttagtacctgagacaaaagtgaggaatgtggtggtgggaggaagagttctgggccagctgtcacccagccatctgatcttcctgttgaatgtgggctacagtagcagttacagtggcaacattggttttcccctgcacagggtctagagcagatgcgtctcccacagggtgtacagcaggaggctgcctgtcactacctcctactgcctcccttgcctttcattttcttatctgtgtgtgtgcttccactccatccctgctgcttctcataaaataatgacgtgtttactttaagacagagcaggaaatacacattgccatttagatatgaaattatctggaaagacttagaatcttattgtcctgccccctgctgtgctgctgaagtcccctgtggcctcttccttactgcgttctcctgctctcccttctctgctcccatgagataattaataataataataataataaaatatttatataacaaaacaatatatgtactgctgtcacagaaggcattatatttcgtactctgctaacagcttttcttagcttcttatttgacaatctttggaatgtctataataaatgcctggtttatttttctgtggaaaaatgtcccttggtcatccagggctggccaacatgctgcttttctctgctgattccttcctgtgacaagagtcaggctttccccagatgaaaggtggtgatctcaacccattcacctcaggaatgacctagctaggcctcactacgtctcttcagtaagtggttaaaactgggtcagacctggctgtactacactacacagagttccatcccacccctgttcctgagacacactgcctgaaccacatggggaaaggacagcacctgccacttctagtgtgacacaggtattaaagctcttattgaggagcagagaacattccagaactgagggtggtcttggttttgtgccattcaaaccagttggcttcctgtctctcaggaaggttgtctgtgagacaaagtgtgtggactagaatctaccacctttgagaagacaatgacctgaggagacacagaatgctgaaggaggcactggggttgtccgtacactgttttcatgagatggaagaggaaggagaccttccacttttggaagaagtgtccaaaatcttgatagaatgtagacagaagtcacagcctcccctctgtccttttggtttgtttctggccacatttggggactagggctgagagacaactcaccaggccagaggtgggtcctagccttcctttgctgggcaaagcacactgttccttctcaagccaaccacgccggctccagggcgcccctcctggcttctgtgtacctccaggctccccagtttgcctgggttggtaaagttttactactacagcagatgggcctatcgtttcaagacattttctacttgtgactcgaagcaaagtttatgttgttatcttctacatgtatatcccagaaaaatgaatcccaagccctggtacgcaagcgaggctctgtggggtttgctgtgggatttggagtcccaaagcatatctggaaattaacagaagctggtgttttccttctgcagttaggggaagttactaacacacacacacgcgcgcacacacacacactcacacacacgcacacacaggcacacacacacacacacacaattgactactaggttgattggtttagtgccttttttccatttataaaacattgatggtttgatagcagtagtctggtctacctcttccctccgctcccatttcttttgattcagggtctcactatgtagccctgtctaacagaactctagagctcactaagaaaggccagcttcattcttgctggtttatggtcctagtttaggacatcttccaggctacctaaggggtgaggcactaggcttcttctatgaactaaacaagggtctttgcttatctcttttcctgagatagagtcatgaacaaaccttctctgtcaaaagacagttaatgttttagtcagaactcctacttggtcttatcagtcgaatacctctgtgtggattgcttgaatatagccagagataacatggaaacagctgtctaaaggttgccagccacaggactaggctgtgtatagttgggtagggacaaagtgatggcctgagacttgaggtagggaacctcaagctctgggctcccagcccttgttctggacctgtcctaatgaggtgtctgctttggcagaagaaagtatttccattccttcacccccaggtgggggaagtcagtatgacacttagtaaaagaggcagataaccacagggctagcagtgaccgcaagaagagacagacctgagatgggataagagacactgaagtcatgtgaaggaaaacttgggcagtgatagttataaaaacataagactagctagaaaaatatgagggttattagagttgtaatgaataaaaccagtttccttctgtgagccggtccatagactatccattggtctagtcacattctaggtacttctacggaattgctctcttctaattattatttttgagacatggattccatgtagctcaggctggcctcaaactcaaccactgcccccgccctatctttctgagatgacagacatatgccatccacagagaagcagatctcttgaaggcagttataaatgcatgtcactacacacttagagtttctcaagtcacacatggtcagattgtttcacactactttagtaacagtgtgtgcttatgtttcgagtgatgaggtttggttttgttttgcttttgccagcttctataccttttactagtatagttttatttacttagattttatgcaccagatgttaaatgtcctcaaaacaaagatgcagtggccctagactgagggatagaaacctaagagcactacagcaggtgagtgtctctgcaggccccaggggctggggtggtggccctgcagctcaggctcaggctgcagtgcagctaggttgggaggtgacactagtcaggacctctcagagtgtctctgtccctgcaaacagggctaggcgctgtatatttctgcctttgtgtctccccattgtgtgaggacgacgggctggaaggatggtctccactacagaagctgagaaagaggactcactacacctgccttcgcttgctcagccatgcgctgggcaatttgtagctagggaatgaggagctgtgctgactggggacacggtgggggccaagagttattattgctccagtgagaaccacgtggatttgggggttgagaagggtgggatacaagggccaggctgagcattccaaagagaaggaaggccaagtgaatattttaagtaaccatgacgtctttttttgttgttttgttttttgttttttgtttttgtttttgtttttcaagacagggtttctctgtgtggccctggctgttctggaactcactttgtagaccaggctggcctcggaatcagaaatccgcctgcctctgcctcccgagtgctgggattaaaggtgtgcgcccccactggctggtttaccatgacttcttctgaagagtaccctttctgttgtcatcgctggtgcggtcactttggatctattttcagcctttgtcacaggagtggctttggtcagctcagggtcccttcacagttcacacccttgtatgcgtaaaagcagagtcctctagctggcagagtctctggagggttcatctatctttgccacctgtgatctcaagcctaggtcccttcatttgtaaagcaaggagttagggtagataatctccggtggcccctccatgtccagtggctctctgtcgctgtgcacctccatatgccataaaacagaatggcttgtatgatgaaatatatatggtgttacgtgtaaggtcactgcagccacaccgcacacattgctttgtcttattgctaaggctggaacatgacaaaattttgcattttctctgaatcgtttatcatgcctcttaatgatgctacttgccttttgttttgtttgttttgttttgttttcccccaagaaaactagcctccaagtctctgctgtgtgagtagaaagaatattaacactttccttccatccagctgcagcagcgcctctctattgcggctgcccttcatttctctctgcattagggaatatgatgccaaggcatgtttaagcaacttagtgtcaatcatggagtctagaatccatcggcccaggccaaggaggaggtaagtaaaattgatctagggagaaggctgagtattaggatgtgcccgtcattgtcgctctcagcggatctccacgaggagagttcctgaggctctgcatgggtcagtgggcgagctgcctcattatacagcatcagcataatccactcttaggtcctttgtgcagcagtgggtctcagccaccccaagttcctgccccggctgctgccctgcagctaattctgatctctttactctgtaattaaatagtcttggtctcaagaacaagacctgatagcactgaacaagcccagccctctactgaaggattcctagttagccccaatccacccctccctccgctggggattattacccttctgtccataaaaagagcacttggtggtcaccaaggtttataggtaataaattacctggtgctaccaggggagaaacagggagagaatttcccagggtgcaatgctgtcgtcatccttccatgatctatgagttcccgttatgtcagaggaacgatttctttcatttttctctaattaatttgagaaatctagcatacttcttctacaggagtgcgtgctaataactgtgatgatttacaacacctgcttaacttgtgtctttaaattttaatcaaagctcactttgtcctttgcttgggatagtttcacaattctttttgctttctttcaacaaagaaaaagaaaagaaaaggaaaggaaaggaaaggaaaggaaaggaaaggaaaggaaaggaaaggaaagaaaaaggacagcacaaccagttggttgaaatttgattcttcttagtagaactgctagttttaattaagtttggaaactggaatatgcttggtattggatgaaatttggcataatgattttcttgacatgttctgaagcaaggactgtgaatctgtattgacgaaggtgttgtacagcttaattgttcctgcttttatgaattaaataagtctttcttttgttggtgcttataaaaatgtgtgtatgcttattaaaggaaagacagaaaaaaaaaggcactctggtccagcctcctatttcaaggccagcctggtctacataacaagttccaggccagtaaaggttatatagtaagcacacacaaaaacacacacacacacaattgtaatctgtgttctttttttgctataataaatagccatagggcttttatgatttttttaattggaaagttatatatttatgtgacatgatattttgatatatgaatactttgtggaaggatcacctcagggtaattaatgtgtccagctccttaaatacgtgttatttctatgtagtaagaacacttaaaatcctctttgagcttgcttgggagataatttacccagtgtataatctcatcgtgaatgccagtatttctcccttccctgtagctggttttgcttctactgacggctgtccttcttgggcttgtcgttaggaaaatcagacaccctcctgtaatgttctgatgctgtgctctgattttgagttgactctcctgtgacttgtgcctgctgtgttcttagcggttggtatttgtgcattatccattttttctctttttcatccccccccctcacttttggcttgcagagggggaggaaaagtgggaatatgcaaacctttaaagagaaagaaagagaagggggggcccacaaaactctagagtagagaagttaggaaaatacatttttgtgttactgaagtaattcaaacgcttttaaactcccttggacgcttttaggggtaaaatgagtgcctgtttgggaagctgggcacagttgtgtgtgcgcatcacatttgtaacacttgtgctggaggacagagctgccttctcagtgagctttcttggtttgcttagctggctcagaacaactccactgctttctcacacctttgtttgctggatactttgtgttgaggatgttttttttccctcccacaggaccacagctctgactcttaattgtttttcctttaagtatacccaaactaattgggaggtgtataaggtacttctggctgtggccttcagaatatgccttcaggctgaagaagtgaatgtgccccctggggtgatggcaccatagctaacatttttaaaaagttttagatgggtactggaggtctttggaaactgaaaaatgtagccaatgaatagaaatagtctaacataggaatgatacatttagcactgaagaactgtaccacaaatattctagggccccttgagtttaagatcttcagtaaacttcatagttgaacatacttcttggaaaacaagtttgccagaaaatttctttcatctatacgtagactacaatggaaaagcgttttctctccctcttaaaacttcatgtctgcttactgaatattctattcagatagttcctttgaaaagtgttatatggagtcaagagaaaatgggcatatgaattagttctactagagtctctgtgtacttcagaataatttaagaatgctttaatacttttaaaaatagttgaagacaggagaataagaaaagggagcctgacaattctgagagaggctataagattaggtccaagtaactaaagcatatgcccatatgtacagcgagatttagtaaaaaggcttatataaacaagagaattttcaaggcaaaggggcagtgtggtagagatgggtggaggtcatttagtaggatgctcttttaaaatccttaactccaattttatgtgccataggatgatttttattttaattatatccattcgaagcaagtacagctaaccaggaagatgaggcctggctcagagaacagactcttcgccaagacacagcctcccagaaccccactggggatcattactgcaggttgcgccatagttcagcttccagggaactactcaggaagtggcacgttgggagtgagctgatagaattgtaaaacacagaatctccaaaggagtggactgtgcagagaggattttcatttacagatataccacagaacaatcttaaagttatctattaaggttgattgtgtggattaggaaacactgttttgaaagtacagcctttgggagcctgactgagttcggtgagagctgtgtaccttgcccatcctacagccatgggccgctagcagcgcatcctctgagccaggccatcttggcagcggtggggccaagcatgaatggttctttgtcatttcagtcagctcactgtgttctgtgctgcttcactgcctgggtgcgtgcacctgaccattgagcctcccttgtcgaggccacatagtctactgtgtgctaggccatgagaaaagctggcttccatagagacggtgacaccgttgttaagagtccgtgaagcccataatgcagagtgtgtggctgtggatagacattgtcatagacccagagcacactgggctgtgtgcagttgggtctggattcttgtttggacaccaaaagtatgctgtctgttattttaagaatgggccacattgtcagttttaattttatcttttgggcatccctgggttcttcctacctttaaattacattacatatttatttacttgctcatttattcactcactctttgacagtttcatacatgtttataagatattctggttgttaaaaaaaaaaaacatcccaaaaccccatgtgtcttcctccccttcctattttcaagtgtgtgtgtgtgtgtgtgtgtgtgtgtgtgtgtgcgcacgtgtgtgcaattatgactatttacatgaacatgggtaaggacttactggtatatagacaacttaccaatggctacaccactgcagaaaaagactcccttgtccagcaatcattcactgaactatctccatttattgtggactattgatgagccccatcttgccagggcttatgcagatagctgctgtgagttcctatgtgcagcaggggagtcacgtccagaagatagcatttgtcggtgttcctcctgatccctgatcttatgttctttcttgctgttccctggctgtaaatcatgtggatggagtcaacaataaggatatagcaatgtttaaagccctactaggaaaagtgcttaaggctgagaggatcaatctacgggagtatttttagcctcctatggtgttttataatttcttaaatttagttttattttacctatatgagtgttaggcctgcatgcatgtgtgcctggtgcctagtaagacagaagagggcattggattcccctagaactgaaatggctgtcgtagactacctttgggtgctaggaatcaaagctagatcctctggaagagcagccagtgcccttaaccaatgaaccacctctccagccaccactgtggtgttctatataattgtctaaccacagcctagagattctttaatattctatgccttcttacaaatacacactttgctgccatctttaaaatcctctgtacatggtaaattatcctaaccctcttgtaccttcaaaatgcagaactattgactaacagttcttctggcttcgtccaggttgtagccacctgtggcctctagggtccatgaattagaatgtcctcctccgaacatgtaacatatccggtggcctgttatctggggctgccataaaagcagcactgtagacaccatgtctgggcagagcttctcacactcgtgcttggagcctggtctcccatgtctcactggctggagcaaacttcacagcagagagcagagtccaggttggaggtctgtcattcctcagcaactgcaaatatgcagtgggcccattttagactgagttcttgggttctggacgtctgtccttcagacctgaagtcaagcatgtgtgtgtgtgccctgttctagattaaaaatttacaggaagtaacagtgtgtccctgtgtagcagtatctatgtccccacagtgaagtaaggaacacaaagtgaatggttggtgaaggcagggagattgctctagtcccacagcatggctggaagggaactgtctccactccctcctggttctgtctgggagaagccctttccttgttcactacaggcaagcatggcgcttctttatctctgaatccctttgtgactttatcagttccactagcacggttctcctgaaccttagctgacatcaggttgcagattgcttccaagtatttctagttgcagaataacatttgtaattgattagacatctcaagacctgtctatgcacaccccaaagtaatgagtcacatacatactccacgtcagcccctctcctgtttagcaaagcttcccgtttcctgtctgaggtttaaacattctcagtcactactcactctccccgtccccgtctaccctcccaccctgccgtgtgccagctggtactcgggccagctcggtaatgcctggcacccagcatccttcatccttccatttcactctgctgcatacactgagctgactggagggaggtcctcattatgtggcccgtgaattcattctctggtacttcctgtgctcagtaatgtgttctctcgtcccaacccaagtcctcgctcttcttcagtatctctttaacagcctctgctcagacaagcacagcagtaagcaacgccattttctggcctagcactccatgttaataatgctagacccttcctgtgttcatctcttcctgtacttagttggctaagaccccctcctctgtcttagtttgtttgtttgtttgtttttgcttttgtttttttactatatatctctgtaaacacaggaacacagagatgatatctttaaagtcacaatcacagagcacagagctgagggtgagaaggcacatgtgtaatcccggggcacaggaggcacaagtgggagtatggagagtgggctacacgataaaatgaaataaagccggaattctctcttaaagaaaggctggagttattcaaatttagaattctggagggggatttttaacatgttaagttttgaagttgctaaaacttgacagttatggaatttttttttcctttcagcatttcccagcagactaataagtatttggtaaaattaaaaatgatttttttctttctataattattatgtgctctgaatggtctctctatagatttaaaagttaaaaatttataagacatttaatttctgcttggtagaggaaacaccttgggaaagggcccttcagttaacccttttaaaacaatcttttataattggaatgattggccattagttagctttacaaatctggacttttaaaatgtgctatttaaacagctggagagatagtacagcagttacaacatgctctgctcttgcaggaaactttactttggttcccaggaaccacatccggggctcactggtccctataattccaactgcaggtgatctggcaacctgtttggaccccatgggtacttgcacttacctgtacatgtctgtgcatgcacacatacacataaatcagtgagacctttgaaggatgctgtttcattataataaccaagaaaacatggtagcattgacatatgcaggatacagcggagtattacagccaagaagtaaaccagaaacagaaccctaagtcacttgagcagtactatcagcaggtagcccagtgttcccaaatctgcagccacggaggaaccagaagatgtaagaagtaagaagtaggaaaggcaagcagcgtcccagggacacacttcacacgagtgcatgactgcaagctgaaagctcatggtttggatttgatttaatgactttttttcattcaataaaagtcagtaaagatatcctggtgcttggagtttggacagcagtcctgtggtaaggcatgcttctttgtgcacacagcagcctagagcccctgaggacactgcggtagacaccccatggtcctgagagtcctcctgtggttccttgcaaagactgaggctggctgtgctgtgtgcagaccctttggtccctcacttgcactgcttccttgctgtcctacaggatggagattggaggaaacagtgcgacaccaaagtagtcatgatttgcctcatctgttgagtgctgtcagggaaatgttttagggcagactgtgaacagcctctgagttgagcattaaagaatggcaattcaaagtaagcatggtggctcctgcctgaaacccttacacttgggaggccagaccaggaggattatgacagattcaaaaccagcctgggttatagtctgagatagtctctcacaaaagagaaaagagagtggtagtccagagtggagcatagtagtgcacatctatcctcttagtgctcagcagacaaagggaggggaccctgagttcaaagctcacctggttacatagagcccaactcagcattaccagacctgggggttggagttctatgataatgtatttgcctagcatgtgcagggccctgggctccatccctaggcagcccttatcttgtatttgacctgctccctgctgggatttgctccctttcctccctggctgagctttctgcctggtaccttctccctgctggaggacagacactgtcccctttaaccctctctcaggagcccccaacaagccccaccctatcctcaaccatgaccactgtgcactctttctttgcagctggggaaaagcattgtttttatttgttgttattgttttatttttattttttaatcaggaacagttaagtttatagagtacagacctacaaaacggtttaaaaagaataaactacaaaaagcgagtcttttcctgaggctatgtgtgtgtgtgtgtgtgtgtgtgtgtgtgtgtgtgtgtgtgtgtgtgtgatctagttgacatctacccctaagcatctttcttctagtgctgtaagtagcccagcaggttctcttccttttcatttatttatgtgcatatgaatgagaaacttctcagcaccatggctcgaagcccagggtctggaggtacagtggtaggttgtagcacagaggctgtggtggccctgaaccctggctttcccacttccttcccagttttctccttgggaaggggtgcctaagctcgttaaaatgacccataggagagactatagagcaatgagcagattcctgatgtttgtagtgtgccctagatagatgctggccccggcagtgctgcactctgtgttcagaaaggatggatgctgagaatcacaagtgctacagagatagaaaaccaaggggtgcaagacggtgtagaaagtggaactggttcccagagggaatgtcatcgctttgtttttgtctgctttgttttgagacagtgccttacttacccttctgctgccttcctaagtagcccagcgtggcttcaggttcacagtcctcttgcctgtagtgcccgagatggggttataggcatggaccactgtgcttggctattttcccctcataatttctatctaaaaagaagctgtaagggtttatttattcattcagcattgagcctgatgttcgggaatgtgtgcttcctacatgagtcccaagaccttcctttggactagaataaggactgcttacccagggagacctgaaacagccgactaaaatgcattctgtggcccagaagttgctcagaccagctaacccgtgaactcataagcatggtgtagatcagtagagagagaacaatgatatgtacattaaagatgccagtgggatctttgttttcactttacattttcaaagaatcttagtcaagtaaacctgtgacaaaacgaagccaaagattgtgctagcctcttatgcaggtatccgagtcttacatcactaactgttaggatggcgtcagcagtctccattgggaaattatttttctctttgctcttgagtgtcttgagagagtcctagaggtgcctgtcacgatcctgcttctcattggacatttgcttactaattttaacatccattgctaactcttagcctgaaatagttgataactgcacagtgcacatcttcatattttattatcttcccctctatctacttacctacatccatgaaaataaacagacattcatgaattctcattttgcaggttgccatgctagccatggtgggctgccataacaaaagaccgtgtagcctggatgccttagacaatagatgtttactcttcgcagcacagggccagagaagcccagcattcctgggaggttgggttctggtgaagtggcctgcacaggccaccttctggctccgctcattcagcctttgactgtgtgcttagcacgaggtataggaaggagggggacgagtgagccttgtgatactttttcttgtgacacagcagccccatcagattccgctccccccaactcccgcccacctctgtgacctcatttaaccctaattgcttcctaaatagtggtatttcatctctaaatgttaagggttaggaattcaatctacaacttggggctggagacagacaaatattaagcctgaaatagctataccccattaccgttattattcataaagaggtctttttaaaagttaggagcaaggattactgctaaaggaaaggaactcgtttgcctgtcagtacgaagcacacggagcagctagcatcattttcctgtggcggtgttgtggtgggaactattttagttcctgcccacctcccacagcccccatttccacatctttagctgctaacgtttgtttgtgtgtgtgtatggtgctgtggctccaacccagcgctggctcatgttactggagcactctcccacagagctccaacctagagttcactagtataaaaagaggagaaccgatgtgtccttctgtgcccgtctgctagctgcagtaggatggacacggggtcacccctccaaactgccatctccttgctgagtctcaagggtattgtaggtctggaaaccaggacttagagcattgggttttgttgttgtttgggggctttttctttcttttctgtgacacgttctagtgttttattaataatctttttctcgctaatgtctgaaaactgagcagtaatgtcactggtctgcaaggaacaaacaacggttctagaagctgctgatacagtggactgtcacccacaggggaaagcagtttcgttgccagatctccatcacacagaagaataattctgtccggtcatatttaagcagttgtttggtagttcttactaagtggctattccagtatgctctggataactacagaatagtgtatttgacatgatgtttataaccttgaagtgtataataagcatggacggggatcacagtattctgtgcccttgaggttagaggaagcaggctcaaccacataataaatactgtgatcactggggcagaataagtcatcggtggaattagaagttgggaagaggaaatggtacagtgtcattgacggtttcacatcattcaggggggctgctggagactcgctcctgtaggcatgcatcggcggtcacatgaagcatgctcaccacactgagagagcatcctataggtgtgccagtcagatgccattcatatgtccttgtgctctccatcatctatgtaattgttaagtagcttcaggctcttactttgggttctttaatgtatattcctcctagtgattcaaatggaagaagattggagtgactgagttaactagtccacagattaggatgctcacactccccaaagcttcgctggaggctttgtctcctgctaaaagtgtacatttaagttgtagagtatgttatttgaatcttaaagttatctttaggtattatttatgtattgcttaaaagtcactcgtggctagggaggtggctcagtgagtcaagggtttgctgtgcaagctttaaacccccaaacctgtgtaaatccaggtacagccatgctcattggaatcccagggctcttgtggcaagatgggaaacacggagagtcaccagctagcctggtatacatgagctgcaaacagcagagatccagtctcaaacctgggagaaagtgaggattgacatccgaggttgtcctctgaccttcatgtgtgcactgtgacatatgtgcactgtgacatatgtgcactgtgacatatgtgtatgtatacccacacaaatacagattaaaataaaataaaaacttaagtttttattcctgttttaaaacatatagagttacagagtatttggaaaagaatagctgtttataatgagctcctctggtagattgtttctctttaagtctttgccctacttgagctatctgcagatggcagcgaacactcaaagatctagacagctcttaattagtaatagtaataaagcacataaaagctagttataggtaagtaactgaccttatgtatgccagtgggtaagtgagatactgaatttgactttatgtatgccagtgggctgttggcagtcacatttttggtttataagtacaggacttagttaaaacagtgtcctcagggatgggaaggaatgtagaaaaaaaacaaatatatgtagtttttacccttccagcacttgtgatcttagagagaagaaagccatgcccaggccagctttgctctcatcatggaatgttttgttccttctgcagctatagtcagtgttgagtctgttcttccattcatcatgtactgtctttgcataaggagtcattatcctctgataattgctgtcactgaacacagtaggacttcttcagctcacatagtcagggctcttgcttggtttgatggcagcagtgaaaatcttaacttctcaggcatcatgacaaggctgcacaaagccacacacagcaagtggcttccttttttactagatttttggcttaacacatgcaagaaacttcaagtaaatatttcttagatttccatcctcggtaacagggacagtcctgtcccttgaggttgcctggagttgatgcaaaagagacaggtgttactaacaaaacactggggaaaccagaactattcaaaccctgcatcatcttctgcataaaccctgaaagacctctcaggacatgtgtagctggttctaggagtgtatttgtgatgccagaggcagggaaggttaggttaaatgcctgctgtttgttttatcttgacaaaacagattagttttaaatgcctcaaaaatgtccccaaaggtggtcaatctatcatgacatgagaaagttttggatatttttaatagctaaagtacaaattcttgttcaaacatgtagagatttccaagtttaaaatccaaggaattgcccgaattaagtctgggtagatcacacccgtaattcgagttaggaattgggattctttgtcatctaattctcagcccatctatttttattgtgatagactctttagaatgatgtgttggaaagaggggaggaaaaatatttatggcacactcatgtgcgggcaagtactcttttttcctaaaataattaatacaaacagtagcatttttgttcttttgacagtttgcaaaaaggcatatttgtgtctcggagatatgcagagtgctctggcatgcttctaaaaatgaatgaacctttaaactacaacagttgtagtgacttttggtttatttttttcaaaaaaacccacagaaatatattttttaaagatttatttatttattgaatatgagtacaccaccactgctctcttcagacacaccagaagaccccattacagatggttatgagccaccatgtggttgctgggaattgaactcaggacctctggaagagcagtcagtgctcctaaccactgagccatctgtccagcccccagagatatttttttgttttagtcccagctgcagtacgtgggggctgcttcagactgtccctggcagctgagtgtgtcagctgtgactctgcctgatggtctagcaggtgtgtttttgcattgtgtgacatttggaattctggggactctcttagggtatataaatgctagggcccgaggctgttggttggttgtagtttgttaagtagtcatgtgcaaagaagcaagaagaagaaattagatatcctgactgaagatcaaacttgccccaaggaaacttgacacccctaagcagcaggaagtagtctaatggtaaggcagcctcctctccccctctattctttttttctctcctatctagtgttagggttgaaaggatggaaaaaagaacccacaaagtagctaaagctggctgcaagttgattttttttcccccatgctacttgtttgatgtatgttatttgcaaagcactttagtgcgttattagtgtctatgcaagcatctcagaaaaagttttcaagtatccgatttgaggctagggcatatatagctctgaggtggagcactggctgagcatggatagagtcttgggtgtgatctctgcacacaatcttgttctatacttcacaccaaaatagaaaataggggcttgggatgtagctcagccgttggagtgcctgcctagcatgcatggtgctcaggcccagcccccagcaccacataaaaccatgcatagtaatgtgtcctggtttactctttattgccatgataaataccatgaccaatagcaacttggggggaggaaaggattaattatcttacacttccacatcacagcctgtcctaaggcaagtcagtgcggaactcaagcatgaacctggaggcgggagctacagcagaggccatggtggagtgctacttactggcttgctcagctgccttttttatacaactacttgctcagaggcaacaccacccacagtgagctggccccttttacatcaatcattaatcaaaaaaaatgctccacagactcgtgtgtatgtcaagctgatggaagctcttcctcaagcaaggaggactttccccggatgggtctagcttatgtcaagttgacaaaaacaaacaaataaatctaactagcaccgtgcaatggtgcaagcctctaaccccagctcttaggagatgggagcagaaggggctcacgttcaaggtcattgttggctgcctagagttcaagagtagtctatctcacataagttaattttttttttaatctataaaggattttctgtagtcgactgtatctgactgtgtgtaggcgcggtaaaatctaagctgaaagatttttagaatacctcataagaaaagaataccctcaaagtgcagaaattctttccttcacaaaggcgagttatgtgaaacatgtcctctgaatgcctgcctgagacttgcttgaattcacaagcttgtggagatggtttgctaaacagttatttcttttttttagataaaatttgagttgcttctcagtttgcttgtttgcttttcccttacagtgcatttatttacttacacatggctaaaacaattttaggccaaagaatgtgtcaaccccccacccccacccaaaaaaaccccacaaaattccatgaatatctgttcagcacaccatataggaaagttcaaagcttaattaaagtttttcagtagaaaatgagggataaggaactattataggcatacaacatgacttatgtactaagagtttacccatacaatctttagctcgtgcatgcatgttgctagggatagaccctagcacaccacgcatgctgaatgcacatggccactgagcttcacccccttggaataacacagttgtagcctacacacttggggttttgaaactttaaatgactgctcacacaagccaatgggaggagagtacactggactcttgcttcattttaaaatgccacgagaaaggctgggccaccgtggttaacacctctggagtcaacttcaggactccagggtcttggtggaaaggatgccggtggccttaccagacttcagagctgggtatagggcttgttggaaggagtcctccctttatttctcatggcctgggaaatgcagttttcccttggtgctgtttccacccattactgcttggttagaaccagcaaacttcatgttaacaggggaaaagcagcctatggggaggttttgacaggggttaaacgggtgatgttgccctgaccacatggctgtgtgaaaggatgggctctctgtctgggaagggggaagggaaggggtgagtgagacgggaagggggtaccaactctacgcccaggaaaaaaacctgtgttagaaagatcctggaactctttattccccgaagcccagcaccagcttttctgttttccacctagagtttgatgggtaaagacactgaaaattctcaaaacaaagcactgaaaggttgggtgcccatactaacatgtacgcatttatgtatacatgctaatatatactttatagcatatttgcaaactctaaaagttcaatcaagtatataaataattagaacaccaaagaacctgtagctttcattaaagacttttttctttcttttctttttagatgcaagtattataattatttaattatttttcaaagttgtatcctaattgtgactttttggaagcttacttctgagttctgtgccatttgcttcttggctttaatagctttgttgttgaaaattgcacctcacaaaaatacataaatccagataatgacagaacatcaccgctgcctgtatttggcaaattatcacatcctctcttatcaacccctgccagctgtactgaacttttattttgttgactttcttttgttgttgttgttgttgttgttgactttcaaatgataaaattatattttactgaaaacttcaaaattggccagggggtttgtccttctttggaagtccaacagatacgttctaaagcaggtagtaaatggaccagagctctgggacacacttctcacgggctccgtagagcattctgtaaggagttgtggatggaagagttttcatggctggcccaagtgcagttgttttggcaagctggcaaacacggaaacttacaaatacctggtttttatacaactctggtttcaaaacttcagtttctctggaggtgttactttctgacttactatagagtctcacctttccctccaaaaaggaagtggaaggactatgtatgggggttttgcctctaggtagaattctgctgagttgcccctctggggactggcagtgttcaccagtgtctaaagtgtcatgtgtgactcatcctgcttggctttccacacacagcctttcttcaatgtagcagtcacttagcaatgccaagccagggattgctagaatcaacttcagtgcaactaggaagcaagcttccccagggtgtgtaatttattctatttttaagtcttgaaacattaaccctgccccaagagcatctgccaacagtaggtactacctggcagagggatttgtgccaatttgatctcacattggattttgtgcatctttagccacttctacgacggtaagagtacagagcttttctctatagtgttgtacaggaatcgtagtgtttgtgtgttggggctttgctgttaatggcaccttgtatgaagcatatgcacattaaccatgaagtttagtgaagtcatttggtagctcagtgtcacatgtgacacattactgacttcaggccctcactggccattccttccacagatcctcaagacctcagtgtggattaggggtgggttgtcattaccaaatatagttgaaaagcaacccgtgttttacctaaagtctttctagtcatttctgttgttctgaacaacagttctttattccacaaagcatttgtattgactgatctagagagaaccgagcaaggtcagctccgcggaccccccctcccccgcccgcgcccgctcgcttgctcactctgggttagcagtagcttgatcggaggtttctttgcagacttccctttaagcacctgcttgctttgtggggtttgtttcactcagctaaagacaagcacagtgtgaatctgaggatcagcccgctgatgcatctgatgaaatgagtgtacagatcatggcaaaggcttagcatgtacacttgacacatacacatggggaaaaacaaaggccagccatctggcagcttattgatattagttcatattccagactgagtgaggttctggtggccagttggtgagttctgggtgcatggagggtaatgcctattggctggtgggtaggtgggtgggttacaagcaaggtagctcttaatattgcctatggtggaattttttctctagggctttttcccccaaggggtgggggagtgtcctggtgtccctaacagagtggcctggactgcagggaagagggtggaggttcaggcccaggagttggagtacaggttctgttaactccttggcccagctggtatcctgctctcaaacccagagcctcttgggacctggtctcaaggaatcagcccttgtctctgcatgtggaagtccagccgtggagacaaggcaggtgcccaagtccctggcccttgtctcttctgtcagtaacagtctgcttcctttctgcctgttaaagattctctgtggtttctcctcttctgtctgtggtatgtttgtctttgccatggggttggagtttttgttgtttttgttttgcgttgttgttgttgttttctgttggtttgttttggttttcatcccccacttcctcttttgtcattccagtagggtttctggaagggaaaagaaataaaaatgtagtcaattcatcaactccaagcaggagtctgggaaaacaccattcctggcatagtggtcgctttcctcattttgttctgtggggcagatcttgggtagtgaagctggctgcgcttctgctgtgtgcttggaaaggaaaacaggagtctagcctaagagaccaggaatccagcttttcctctctggaatcttaatgctaggccggcagtgaaatctcttttttaaaaaaatctctctgggcgataaataaataaataaaacaaaaccagactccaaaccgaatcctttcccttcatctgcgggttttactaatgacgtctgtgtgattggcaggctaagatgcatggctctcttgcattgcttactttctaagcatatgtgtttgactctggaggatgccagtgggaacatggtgtgacgagccaacttaccttctgcatggccacttgcacctcattcccaaaggactgtgagagttaggatccctgccagaatgactgtcagcaccccattgtcctgatagaatcctgacctcacagggtacatggaatgagagcatcctccttacaagatggattcacaggaagtcgtaaattatttgagtatattagagtgagaccgagaagaaagatgtgctcctttgaagctttccagattcgtttcttttttcttcttcttcttctttttttttggtttttcgagacagggtttctctgtgtagccttggctgtcctggaactcactctgtagaccaggctggcctcgaactcagaaatccgtctgcctctgcctcccgagtgctgggattaaaggcgtgcaccaccacgcctggcttaacctgcctattctaaaagaggccagaaatccagctttttgtgtaaattttctgaagtctgatagacaagtaattaattcaagcacttcctaaattacccagctgaaaaagtacatcatttgacatctcttctcaagctcattttaaaggcaaagggtgagatcaggggcctctgggccctgaatgaagaagtaaaaccagcctcagtcatgggtctctagactccaaggctggggtccttctcagtagaccacgttgtaacatttgttttcattggcaacgtctttcttagattttttttttaaactccatatgcttctggaataacttacagatttctggccttaattctcaatttaatgttggattctgtgttttatgggtggtaaattttaacatgaatctattctttgagttggtagtgagccagccactgaggcgtgtccatcagaaatctctgtggtactggactggggagatgatggctcagttggaaaagtgtttgcctcacagacaggaagacctgactccaattcccaggacctacatttaaaaaaatgtatatatttataattgctgtgttaaaggaggcaggcacaggaagagccctggcgtttacacccagctaacctaggtaacttgacaaggtcagtgagagactcttcaaaacaacaaactggatagctcctaaggactgacacttgaggtcgacgtctgtatgtgcaagtgtatagatacacatgtgcacacactacccacccacagcatgtggagagggaacaggtagggaaatgactcttgataatagagctttggggcaatgcgttgccggatggtatactgctcctggttttattattattttaatcaagtagccactgtgcaaaagattgactcgattgcttttagttaaaaggaaataaaaccgtaagtgactaatttagggttttgagtttgcaggtgaaggagacagactcttttgtctgtgcttgtatctgagctttgctatcagaacaatttcatttgccctgtcataatgaaacattgttttctagatagtggaaggtagctcactcttggatcctgtcatctgtgtgatctgtaatatggaagtattagcttttccaaaatggcctcagaaatgagtattgatggaacggctgtaggaaattggcctcacccagtaacaagtaaagatacactttgcaaataccttcagctagccgcctgttattcctgcccctgtaattggctctaatttgctctgcctgccccaccgaaacctcagaactttctaattggtattcagtttgcagggttaactgtaaccagagccactccagcccaagtgtgggccatatgcctgtgtctggactggttttgaaagttcttaattgtttcaacctatctctgtgacaaggttgtaaaaagtatttacaaatgatgtgcaaattattgaagatttgatttccccttgcatggaacttactagttacaagtgactatccaattaatactaaaatctgattttaaaaaatttaggttaaaaaaaaattaggtaattcttcccaaagttaagttagtaggaaagatgtaatttgaaaatgtgttactgttgttgttgttgttgttgtgattttgttccctctctgctactcttctgctttgttttgtttttattgttgaaacaagatatctgtgtttttcctcattagtttcaattgcaaattattgtaaccttcaaagctgtaagtttctttggtctgcatcccctgtgataacaaataaggctgctcaaaaagagctggggcagggatctcagtggctatcagtaataatcagtgaacgttcccatttgtgtgagtgtggacccgtcatgtgtgggagttggtagaactggccacggcctccgactcctgccacacactataaatactgttttcattcatttcctaagtggaatgaaccttagggcagaaaaaaaagtgcttaaagtaaatgatttggtagaaaaatcttgtgtgctttaccggagggctgcagggaacttcttaggatgagtccagtaagtatgacgtatttagttttgaatggtactaatggaaggggcgttctttctttcttttctttttttttttttggtttttggagacagggtttctttgtgtagacctggctgtcctggaactcactctatagaccaggctggcctcgaactcagaaatccacctgcctctgcttcccaagtgctgggattaaaggcgttcgccaccactgcctggcggaaggggcgttctttaaaacagtaacaaggaatcagtcatgctgtttaccttctgagaaagccaaaagcaatgaaaacccaggatgggaactctggcatggcactcttaatgatgagctttccctttaagaaccttagtaacggtaacccgcattctaattaaccacacccagttatgcatgctaactctttctcctgctgggtctttggtaatggtgactctttggcgcatattctggtccagttgccaccttataggtttctctctgttgttgaactgtgttttaacgtaggcattcaggttgcttctcttgagattggagaaggaatgagtggacatctctgggtccttcccactcttcctgttgccaccccacatccagccctgatctccggtagacttggctgctcccagacatctctgctccccaggaagctcctgatagtgtgcccacagctgcctgcacacaccagagtcctgttttaactcagtgaatcaggatttgtagagaagtgtctttactaaaatcagattaaacgtctgggtcgcctctacatgtgagagattttggggttttgatccctcccccatttttcttggttgaattaaaaccatttgctagacaagcgagctggtacactcctttaatcccagagacaggtgggtctctgtgagttcgagagcctagtttgtgtagtgagttccaacccgtcaggggctatatagtgagaccatgtctcaaaacaaacaaacagaaaaataattaaaagcccaaacataattatctattggtctaaaaacatgatgtttagggtgaatgcatcttacttaattgtcataaataatgccttaaaatttatgatcttatcctttagttggcttaaaaagtatatattaactatatatttttcttaatgcctcggcatgaaacaaactttgtggggtcacctttatgtgccataagttttgtttatttcttgtctagaatctgctcattggtcctgatttttgaagcttagatgcatgcttgcagtgtgaatttacatacagggatgggactcacttcagtcatgtaactcacaggaagcaatggacctgggatttccagtgtggtagctaacttgcacctgataggaagccgagcgttcttctgtggagaaaagtcaagacccctttcccacagagagctgttaggaaagcccacagaagactgctgggtagtgggtaaagcatgggttttccctgagttagaggaaaatgtagacaattatctataatacgtaattgttatggagactgatttgcgcccttcagtgataactgtttatgattctttcagatttggatgcagcctggtgactgagtcacaagtagctgcacagaagtggtaacagttgagggacaaatcgcaccttgggttgtgtgggtgagaccgcagctggtctaactgtggacagcagcacacattcagttaagcacacatttactgttttctaaaaaagaatttcttcagtttttaacacaacagagggttaatttttaaatgagctttctatggctctttgctgtgaatcctcaccctctaggctggtagaaatgtaaagagatcctgagtttgggaaatgtagccacttgctaggactgctggagtcttcacgacgtgggttggattccagctgcagcttgaccagctaatagcgggcagcaaatctcactaagcctgcattgcctcatctgggaaatggaactgatgctacctacactattgggttataaatatcagattagatgccatgtctagaggggtcagcatggtgtttggcagatgcccagtaagtattagctatggcattaatcccaagtattaaagtgtgttcacacaaagctgaacagaggcaagacatctgcctgcccctcttcctccatttcctactttgcccattcccctctgccccgcccccttccttagctcttgaattataatgtggtcaggtcatttgggcacttggtactaacagacatttgtaccagccctctccaccgcaccatagccttgctttcattgatgttgacaacagagctcctttatttcatgtctgtgaggcctgggtactgtgagtctctgtacccagtggctcagcagagagtaatacctgtgttttagggggtgactggtacggcataaacagaaccacaaggtccttcgcagggtacagggagacccagccggtggcctctctgcatggacttatatctgatacacttagaaaagtgctgagctatgtccgatggttactatgtctatctaagcagagcaaaactgactttcccagagaggtgtgacgaccattaagggctccccgtatgaaggctatgctgtccttctgttgtaagagttcattacatatttgcaaccctatagactgtgcccggaatggcaggctcataggctaaagggagtgaagtcacccaggaagttgaataagctttcattgttcaagcactgctgaagttaatacgtttcagtaaggctggtgatgagtcctaaccttaagcaccagaatgaagcattcctacaggaaacagtcgaggctcaagagatgctgttggaaacctattgattactaattaaaagttgcctttgagtggcaggggctttgattcactgtgtgttcatgggtggttaattcacttggcccagaagtttgaacgaatgacttggtaggggaagggaaagacaatataaagctactataagtgaaagacaatgtaaaggacagatgaaatggcctgtctgattaaactccgcatcaacctattcctcagtcataaagggagaaagtgagctagggagatggcttgatctggaaagtacctcctgtaccaagcaccaggacctgagttgatagcgcgtgctcctgtaaccccagcagtggattcagaccaccgctgaagttcttggcatcctgcctaccctaatggatgatcttcctgctcagtgagaggccctatctcaaaaacaaaaacaaaaacagaaggggtggaactactccaggaagacactgaatgtcaaccttggacctccacacccacacccacgtaccgacactagaaagtatacatctcacccaaacccagcacatacctaagtaaataaatacacatgcattgtctgtgtagtatgaaggtgaatttaatgtcattcccttcagcaagccgtttatcccacctctgctccaagttcccagtacactcactgtctagactcaactgtttctattagctgcctggggcttgtgttcaagtgtcctgcctatcaattcctccacaagtgacttgtgtgacactgacttctcatttctggtgatggccttcaccctgcagctgccttgctcctctatctaccacaccatgagcaaggatctcagacataaaaggctgatctgatccatccatcatccatccatccatcaatccatgtgtccatccagctccatgcctgctccctgatccacactcctccagcatctactcaatgcctttactctgacccctccaactcagaatgcaaatggactgtaaactctgccccagagccaagccccacttcttatctcattttctaccttttgcattaacacttttcaggctcttcttttctctgagccaccaactgctatcagctttacctgacaaaatgttgcaaccagcagcagcctgcagtgtcctgaaatcaagctcctgtctaagaagccattaatgcattcaaatccccgtcctagcaagaaactcattgcttgtttgcttgattttgtttttgctttctgcaaccaagaacccttcagagtaccttccatagtgcagaaagtacacatgtttaaagtggtttaatgtttttattgaaatcatcaagggagaaaatagcatggggatcaagtgcaaaaaaacaagaaaaaaaaaaggcagttttcatagtcatgcacagatcagattcatccccagcacctcccatggtgtaaaagaaatgggatgctgtgatttgtcctctgaagcctgtatctttctttgctttttgttttttcttgagatagcctcactgggtagcccaggttggcctcagacttgccatcctcctcgtccagacacccaagtgactcctaagccatatttgagcttctcattcccatgaagccatcttctccctgagtgaaggtctcaacttcatgttcaagctccatgccaatacttatatttaaactcaatccctataattaagaaaagagtgaatgtggatatctgcaccatttttgaggtgctccaaaatataaatcgtatctgcatttaatagatacttacctcacaggtaaaattcctctgtctctgataacactttgttcaccgaggaagttgtccttgaagtgggatcagtggagttctgtgtctggaaggagacaaggagacagaatgagggttgggcatccctaagggacaaatggccttatggactagccccctgtattccttctgcaccacccaggctcagtgtgggagggagagaagaacctgggcggtagctgggagggagtgaggacaaccaggaaagagttcctggtgggaagcagaggaaaggcacagttcctgttctcccagattttttgccactatgtggcatcctcaccaggataaccaatgctatctacgttgtgtttttctagatcaatgaactgagccacgttcaaatccctgtcatgttgatgcctgatgacttcaaagcctactcaaagataaaggttgacaaccacctttttaacaagtaagtatggtgcagcctctctggagactccctggctgggcagatgaggacttttctgactttctgtaatcacacagttttttcaatgggtgggagtaaagttttgctgatgaagtttagtcctgtgataaacacagccatctgtcacattcagagagcagcagtgggccccctgggataatatccctttgccatatggcatattgttccctatgagtgtcttatacattaagtgatatcctcattactacttaaatgtttggagctgtaaattacttgggttgtttgagcagttatggacttttgctcttatacacaaaactctaaaaacagtggctttatgaattgaaatgactacattaaaacaattaacaattaatgtgtgttattataaaacataactggatgtcatgtttgggtgtcaataatgttcttcatgtgaatgggatacctttgatgtcaattagtcagtttattcaaaatttagagctacagcatggcgcttcctccacagggactgtagccaggacggaagctggaaactgacacatacacaaattcctgtcattcctgtatagagaacagtaatagaggggtgtccacaaattgtatttatcgtttcgtgagagcacagaggaggggcagttctctacgagtcaggcgagccttagagtaacctctcgtgagtgtgaaatttctttcctcctcttctctttgtcgtagtactggggattgaacctagggactcacacatgctaggctctaccactgagctaccccctgccctccatgcagtgtgttaaccatggttttgttctgatgtgaactcataaattcccatgatcatgtttacaggttgactttgtgtataaacacacaaaggtgtggttgaggggaagggcttgattgtagggatgagggagagagtgcagccaggggcatctagggaagtccagagcagagacaaacagaaccctgagcatggtcagcagactgaactgggccatgaggggtgggaggcagggaagggtgagagaagaagacaaaagagaaagccaagagagcacaaaagagacagttggacaaaaggaccaagagagaggcaagtgagagtgggccaagagagcacagggctgacagggcagggctatttaggattggaagctgggggaagggagctggaaaggtttagggtaggggtggggtgagaagaactgagaggagccctggcactgagtgagccaagccgggaggccagcctgggctttagtatgctaattggcaccacagttagccatttggcctgagtttctcttggacctgacaatgaggaaaagttcttagtgtgaatttagaatgtggttcttgggtgtgaggcagccttgtttgacagctgcctccatagtgaccttgctgttgtcacctgtcctttttcactgccatcctctctgctcttcactgtgtgcttccagcttgtccctccccactcctctttttggggaatggctgctatgtgcagccagtgttagggggcgccacagtctcagtgtgagaacagagggcattttcaacctgtctctctgtcaggtctgattgggttgtatctagtgcttgctgtgggcagtgagctctcacaacctcactgctacacacaggtccaggtcgggcagagtgaagcctgttagcctccagtgtgtctgagcctcactccacaatgtgacccttgcagggaaaacatgccgagccatttcaagtttaaggaatactgcccaatggtcttccggaatctgcgggagaggtttggaatcgacgaccaagatttccaggtgagctgcttatgtgagatggctttgctctgtcaggtaggacttgtgtttctgtccttgtgagaagcatcctttgcaggctcaggttgcagtgttcattctgaacggaggcattctctaaggcaaggggtctgtatggtgtgatgtcagggatgtgtctgtaggaaaagaagacagcactgaagagtgaacactctcacttctagagccagtttctgccagccatgctgctttctgccttctctccctgtacttggtgcagtctccattttgactttctaatgagagagaactttttaagtagctgcggctccttgaccagtctcctaaaggaaaatctgctttcttagtacttgtttgtttgtttgtttgggggttttgttttgtttgtttgtttgtttttcgagacagggtttctctgtgtagctctggatgtcctggaactcactctgtagaccaggctggcctcgaactcagaaatccacctgcctctgcctctgcctctgcctctgcctctgcctctgcctctgcctcctaggtgctgggattaaaggtgtgcgccaccactgcccggcttcttagtacttttaagatgctgtgataagataccatgagtgaggtaacttaggagagaaaatgtttatctggggcttacagttccagatattgagcccatgaccagcatggtgggagcatggtggcagtcaggcatgatgctggaacagtagctgagaaatcacataaagcagaaagagctaactggaaatggtgtgggctttgaaacctcaaagcctgcctctcaagataaaccctttcctaatcttttccaaatagttccaccaactgacaaccaaatattcaaaatatctgagcctgtgggagccactctcatttcaaaccaccacgtctgccagtgattccctgagcttcatatagacagcagatcaataagtgctaaaggtttgtttttgtttgcttgcttgttttaaagcagaaatctgactactaacttgtcttgcatctcctcagatggataagcactctctctaacttgccctaaatttgaaacctgcatcaatgccacattgccaccccaggcaaccttacaagtgccacatgggcacagcttgctctaaggtttctcttgaagaataggcttagtcaggcaagctgtgcttgcttagcctacttccctaaagattaggctcccattcccacccacctttgttaacctttccgagagtttttgctgtgcttcatcaggcatgagaccgcttcccaagtgacctgtaggctcctagggctccccagatgtccaggttctgagctgaaggtctgggtatcaaaggaaggctcagtggtaaaggatgcgacctgcagaatctgtgtattccttccctcagatggctctgacgtcagcaccaggtttcaacttcattgatgaaacaagccctagatcacaattatgggtgcagtgttcatggttgaaagagtgagtgtctgctacagaaggagtgaaaaaaaaaagggttatgtgaagaaggaataattttatgtggcctgagaactgttactgcatttaaacaagccatggagtttttgaaatctctgcttgaccctggagtgtgtccctcctgcatcccacctttccccattttaattagaaaatagccagggcccagtgggatggctcagtcatcaaaaagcctgctacacaggtgtgaggacttgaatttggatcaccatggtaagcccgatggagacaacggagacaggtggggtctctggagctcactggccagccagtcagttactgagctatggctttagtgaggaaccctgtctcaaaacatggggcaggaagaagtggaggtgtggctccttatgtcacatctaacacatgcatctacatgtacacgcacccatatgcacatacaatacacatgcatctacatgtacacacacccatatgcacatacaacacatatgcatctatatgaatttcaatggcccccactacagaaccttcatatgcttcttgattgattactgaattgaaatctttatgtttctcctcatcagttctattggagagattgaaagtgatcccattttgtggtggcagaaaaaagtggcttttaaagtttcctaaaatgacagttgtgttgctgaaatactaatgcagcacgctgtccccctaaaagtaacaccatagaagttgatatttacggatgtgcaaatcgaggcgcgcagactttgagaggaaaagaggtgagcagaggaaggctcacaaggaactagttggcaagtctcttgcacactgagcagaagcgcagaatggaggaagttactctgagtgtgattaatcatctgaccagctctttccctcagctctgcctgctgctccgggcatgtaaagcattgctttctctgtgacaactgtatttcttttgaaaattatttttactgaaagttcagaaggccttcagtaaaccagaggtggacttttctctccacatctatgttcctttcccagaatcctcatgctctaaagctgcctcagcagactggggtgtagttccgtggtagagcacttgctcagcaagcatagatttgtgggactgaggcttagtctagttggctgaatggtttggctgaaggcaagtcagttgacaccctggctctttacttgaacctggtaggctcccttgtaaatcctaaagtggcccaggatccaggccagcccatcaactcagccaccagccagccctgtgcgtcaccctgcagaggcactggcttgctgatgggctgtggctgttgtctgactgtgtgttttctgaagtgcttgtattttagatgggtgacttagatcactgtggcaatagaaccaggatcatctgattaattgtgtacttgtgtctttccttttactcaaaatgatgcctgtctcaccttgatccttcagggttgtttagtaaaggcttcttcgataatgtagaagggggtaagtagccagcgaaactgagctctgtctgtgaactttaacatcctgacagaggctggaaacattcgtcccagccagcaaacgtgtctttactcttgtactgatttcatgggtgcatggatgtctttaacttctttttttttttttctgttaaagacaaatttaaacaacagttccattatgggctatctatcactagttcccagtaccatccatgataaacactttttgttgctatgacagaatgcctgagaaaaataatgtaaaaagaagaaggatttcgttgggctcatggtttcagaatgtataaacccaggatgcttggggcctggcctaaggcaggatatcatggttatagaagcacatgataagacaaccagggagcagagaaagagggggagagaccagaggagggagaggaaagcagaggagaaaggaagaagggagagacagaaagagccccttcaaaggcacaccccttcatgacctttcatcaacctggtccagtctcctagtttctgtcaccccccaataaagccattggattatgagtccacgagtggattaagccaccccttagcttgaactcacatagtcccatcagctcccagaagctcttccagctagggcccaagtcttccaaaccctacacctacctaacatacagatgttgacgtgtgtgtctgtgcatgtgtgtgtgtggagggtggggggaggacgtgcctggacgcatgcctggtaattttaggttcagtctgagtttagtggcttagtatttttttaattatataataggtttgtgatattctcagactgagttctgctttcctggttgttgttggtccatgtggtcccctgtccctgcttcttttaggatgcttttaaggatgacactgtcattgaaggttccactactacattttctatatttccagtaccacaagccctggccccttcactctgatttcgctcaagctgattgactgtaagtgtatctatttgtcctgctgtgtttcagattctatgctaaacattccaggtatcttccctacctcctaagtgctggaatacagtcatgtgccaccatgcccagttctatgcggtcaggatggaacccagagcttcatgcctgttaggcaagcattccaccaactgagctacatccccatatttgatgcccaaaggcctagacattcttgggaatacagacaaaagagtgaagcagtgacagtttggaaacattctagattctatagtaaatgttaagatgtttccttagctttgagaaagtctgccacctccttgctggctttgcaggacatcagccctcttaagacagtcctgggaagttggatagaggtttcagtttgcttgtgggtgtccggagaagactacccatcaaaccaagaagttgcccaggatggagcctgcaagttcaacctaaatccaaacacagggcacagttgccactaagccctcttgttcattgtgttggataacaccaggttttgctcgcaccgactgcttcctggatccgaatccctcgttatttgagttcggtgcccttctttgtatcagcaacagagttctgattttaaaactcattcattttagatactaacattttaaacttctgatgttcttgttttaagtttcaagctctaacttgaagaccttcccagcttaccgcattttagggagtaggggattctgccaggacatctgtcaaataaagatgtttgcagggcagactttcaaggtgacttaaagctgtgtgaaagaaggaactatagtctttcctatactgcctaccttcccgttgacagctctagaagaagggagggtcgggggtgttcgtgcagtacatcacaactgggtagagagggagctgcagatggggaagttgccaggcacacaaggagagcatgatatcaagtctgaagacctcaccttatctgcagctagcaagcaattttgtggattttgtgcaggggagaagagatgtatgaagtctgcttttgttttttgtgagtatatgtgtatatgatttaaatacgtatgtatttatgtgcatgtatgtatatgtgtttgcatgcatgtgtgaatgcatgcagaagccagaaactggtgtctggtatctttctgagttgctatccactttacacatggcctctccctgaatctggagctcactggtttcactgagaacccccgtctcttgactttatgtggatgtgtgtagatcctaactcaggtggcaagtactttatctactgagccatgtcccagaccctgaaatctgggaagggggtagtaaataatttttaaaagtcttattttttattcatgtttacgtgtgtatgccacatgagtgcaggtacccacagtggccagaagagggcatcaggtgccctcttgtgatcaaccctacatgagtaggaagagcagcaggattttgagtcatggaagggaattgggagtttaatgcaagaagagaggggaagataaagttgagtttctgacctgtggcttggagatcatgaagtacacacaagactgttggccactcagtaggagtctgggggagaggcccagctccaggaagcttggccataggaacccttgtgggagccttcctggattctgtctctcgacagtcataccgagtgtccccacctgtatgttcttgctctgtgcactgtttcaactcttgtctcttcccctctgggctgctggtatcttagttgggcttttattgttgtgaagagacgccaaggccaaggcaactctcttataaaggcaaatataattgaggcgggcttgcaggttcagaggttcagtccattatcatggcaggaagcatgtcagcatccaggctgacatcttgctattgaagttgagagttctatatcttgatcatcagccatgaggagactgtctcccacaggtagtcagcaggaaggtctcttttgccctgggtggagcttaagcataggacctcaaagttcacttgtacagtaacacacttcccccaacaaggacacacctactccaacaagaacatacctcctaatagtgtcacttcccatgcgccaagattgttcaaaccaccacagtttttgggtttgtccagctcactcttgcagtttgttctccctggatagccacgttccgcattcccatggggccctgggtagttactccatcctgttcgtggacacttgggctaaaacacacaggcattccatctcggatgctcagccttaagaagcataagatgcactccacatcaccccaatctgcatcccgtttcttggatgttttcctctcttctctgaaagttgagaagatgattctcctccctccccatcacagtgtctctacccctccttcaagcactgttttcctgctgggcctgtgtttcctgcctggaacctgctgtacatccccgtgtgcaagcaaggtaaacacaatgtttccatttcatgagcctcggagcatctagtgttagagctccaaaatcaagtccaccagagagtttaaaacactgttctcataatgttctgtgaggcccctgcaccgtgttctctgttaccgttcattgtagtctttttctctgatagttgtttcattattgataagcattaaatgttttgctgtactgtaaaacggaagccattctgtgtttagggtcactgctcccacttcctttaataagaacttaacaccaggctttgagcacagtccacctttaatgactccacagtgatggtcaagttagcttgttggtctttaacattctcatgatatcagaagcccacctgtgcttgctcccatatgtccaagggaaacccagaatacaactctctgagggataatcgctctttccttctgactctgtgatctgaggcatggagtcataatcctgagttgtcaacaggtgtctaggcttctggttcgtaaaacaggtgcccacactgggaaaagaacgcttcatgagagtctagatgaaccctgggtcttcagccactatgcccatgttcacccaccgtggtgggtctcagtttcatctgtgatatgggataggggtggggcaacaaactttcccaggtctctcagctaagctccatcttcactctgtgtttcccgcctgtcatatcctccaccactctctgttgccatgatgtcctgctcaagccctgggtccaagctgtactaagcactcccaaacctctaacccaaataacaccttcctacttaagttgttttggtcacagtgacttaaagagttacaaatacagcttcttgtgcataatattgacagctcctcctaggaagctaagtgctttcccacattggagcttggtagaacggattgtttttcaagtagtcttccttttgactaacgttttttaaaggttccgcatatgatttttttaaaataaaacctacatttatttatttatttatttatttatttatagtgtgtgtgaattatgataaggagtgggctgaggtgccacagtacacaaatggcaagtgtgcaaatgtgagatgtcagtgtcaataagtgtgtaagtgtcagaagacaacctcagttctttcttccatcatgtggttctcaggaatccaactcggtcatcaggcttggctgcaagcacctttccaccctgagacatcccgctggcccttcacaagtgacttttgccagaatgtgcaagctacaagtagcaaaatagcaaaactatatggagataggagattaggtcaagagagttaagtgtgaaaaaatgcttggtattttcaacgaaggtgctgggggaagtgacagttactaaagcaggatgttttatgagaactataaaggactggtgattggaatgagctaattaaattgacctttatgatttctccccttttggaggctccactaagcctggacctcccactgtggaagtaaacaccctcggtgcccaccattagaggaggagggtgggaaggagggcactgttaatccttttctgaaagcggaaggacagtaaatttccaattataaatacgggaagaccatcgcaggggaacttccctcattagcttgctttatttcctgtcgagggctgccagaacaccagagcctcaaacacagctgctgaggcttgagacaggatatcagatgtcacaagacatatctatggaaaagggaacttaagtaccaacttgtatgattgggtttaaaagggacgtcgttttatctgcccatcaccatagctttgtcttagaaccgcagctttcatccagatagacattttaccctcagctacccagaaagccagagtcagccttagaagcaacatctgctgcctgtgacttgtcccccacagttacagctcagcactggaatgagcagaggtcacttgtgtctccgtcctcagcctgggtcagcctggggtctgtagctttcacagctgtgccgcccatggcctcgtgcagtgatacctgtgtttctgggccattggataaaaatgtgtgggccaactgcagcaccttttaactgtgaaatgtccagatcaggcaaatgtaccacaacaagaaaccctcagaaggggacagagaaagggaatcggaacagaaatgtagacaggttgctaaaaatgctgtaaaaaggacaggacagtagctgcacggctttgcaaactcacgaaaccttctgagttggacgctttaggtgagtggtatggtctgtgagtggtttctaagtaaagccaccgaaaaggaatgtttagaaattggcagggcagctctgtggataagggcacgtggtgccaatcctgatgatctaagtttaatttccaaaacccacatgatagacaagaacagttaccacacagggccatacacatatgcgcacaagtgagtgtatgtttacttaaaaagtaagagaatgtctaggggcacaggagatgtgcctcagtaggtgtagtgtttaccgtgaaagaacgaagacctgagttttgatttcaggcagccacataaaacaacatacttcagtaatccagatgctggagaggaagaggcaggagggtgctgggggcttggatagctagccagccagcctagccaaactggtgagcctcaggttcagtgaaagaccaagacacctggcatcaacttccgtcttacatacatgtacacacacacattcacatgtatccatgcatatacattacacacagataaaattcatttatttttagaaaagaaattcagagtttaaaattagtttatacttaatgtgagactttttatcaatattgattttgtctgcttttttcttggaacaagttagaacattatatctacttaggacaacttttaaagactgatagtttatgatatgaaattaccaaatgtaaagaaggaaagctatagccaatgaatatagcatattttgtagtttgtgtacatttatcattagtttttctgtttcataaactaagaggaaatcgttggccatttcccaaatctctgggaattaacaacaccaatttatcctgattaataattataaaaggaagccggagaccggtcagtccagctgtgtttctctgcaaataaatgggtctggtgggagtaggggcattgctgttgggctgtgatttgtactgagttgtttttattgcagacccttttgtcctgccccgtgttgccctgactcccatctgtagcctttagtttgagaagatgctgtgctgtaagcacagaaggaccttgggtggccctgctgtgtcagctttcctgggagaggtgggaatattttctttttccaacaacaaactgaagaaccagtctgacccaagtctagcccagtaaaacactgtgtttattagagctacctcaggagcatggattatcctgagacagctgcttcactgaaagtcccatcccgtgggtgacagctgcccaaagctgcatgggtggagtcccttctttctcctcttgtccttagccttcccaaggctctgtccagctggagcaggattaatgacagctgggggagggaacatgtggcagaatctctgaccacggtttaatgactctcccatccccttccctcgcaggagcatcaacaagcccttcttgtcaaagtcttattgggaagtcccagctgctccgatttagatggtaaaggtcatactgtgccccgaaacatctccccacagctgggggttctcaacttgaagctgctcctttaagtggtttgactgctttgataagaacgtcttgtaggaagggaatatagaagatgatcacctgtcacttggaactgatccgtgcagaacgttagattagaatgttaatcttatttcagggtggataacttgtccaagctttatctaaagctaggaatttgaattttcaagggagcagatctctccaaacctggggtgggtttctgtgggttgatttttgtctgataccttttcctgaggaatcatgagtgcataagaatcctgaaaagtaagtgttgtaatttgggaatggagattatgagtaaaccaaaagtggcgcttttcatccttgattggatcagatctgaaagttttgcttttgtatccattaatttaaaagatttttaaaaatagcacttctgttggccgtccttctcaccaacgtgcctactccgtttccgaggtcactattgtggaggataagctacagcgtgccttcccaaagcagagagatgcagtcctttcttgatcttttctcctagcaaagcctatgctcttctaagcaaagaaagtagagcaggtggagctcagtggtaggagaattaaaattctccaacagtcctcggctcatttgagttaagatgtacatgataaagtgaccagaaacacgtgaagaggtcctaggtaggcatgacctgcagcccacaggactcctgggaaacactagagcctgtgcattctccagctgcatcttcacactgtaaactaactctcaaagcctatgcatcctccagcagcatcttcatactataactcctataacataactcccaggagcagcactaggcactctgctcctcatactgtaccccagacacacaagtgcctcagctcttgcctggagagaagatggctcctgtccctgcccgtgagggtgctgcctttgaatgaaccaaggcttcctcctcaggttaataaaagcctacataaagtagactggctgctttaataccatggctattatcgatattttccacacacttaactcagcaaaattgaaaacataggaacaagtttgatttttttttgccagctgactcacactctaaattgatatcagaaggtgtttgtcaccatggaaaaatcaatatgagctgtcctattgaatatgcctgccacactttagagcctgaggccttgtgggtgctggagtaactgggtgtgcacctaagaacttagatgggctttcactggcatcctctaggtctgttttcttatctccaagttgagggtgttgggataatctttgaagctgcttccaactctgatgtgagatgggccccttgcagcacctatagccccttggtctccctccagtccaagaaatcctatacagtgttgggattcttgtttcctttgcaatagaacaaggaccctcagatcttccatattctgtttcatgagatcacaggctttgaacagttcttcccttaatgccagtgcttgctcttgctggggctgtcctgaacacatctggcatctgtgaagtataagttttatgtagacctttgaattattgtcatctttttaatcttggcctagatgtcctaaactgtcactatatacttccaagactacgatggccttccagtctcctgactagaatctccttggaagacatgctctgtgttctaagacccacacctccagcctttgcttaagcaaagagccatgtctttagaggaaattgtattttggctccggatggacttttgttttgttttgtctgtgtgtgtgtgtgtgtgtgtgtgtgtgtggtgtgtgcatgcctgtgtataggcatatttagagatgtctgggtacatgtgtatgggggttcatgtgtagggggaagctagagcttaatgtctgctgtcttcctcaattgctttttgctttaattactgaagcatgcatgaggccttgggctctagagtatggcaggcatttcagtaggatcgttcatattgatttttccatggtgacaaacaccttctaaggtctctggctgaagccagccagtcggctttctgcacaagtattttcccacccctctacccctgcctctgcctctgagcactggggttataggcaggccagttcccatactcagtttgtgcagcgagtgtttgatctgttgtcttgtcttactacccttcattttacagaccagaagttgaatctcaaagaagccaaatgacatatgcaaaggccaaggaatgccaggtggtgtaggaatggcaggtggaggtgtagagatgtcaggtggtggtataggaatggcaggtggtggtgtagggatcgcagatgatacagtaatggcaggtggtacagtaatggcaggtggtggtgtagggatggcaggtggtgtaggaatggcaggtggtggtgtagggatggcaggtggtgtaggaatggcaggtggtgtaggaatggcaggtggtgtaggaatggcaggtggtgtagggatggcaggtggtgtagggatggcaggtggtgtaggaatggcaggtggtgtaggaatggcaggtggtggtgtagggatggcaggtgttgtaggaatggcaggtgttgtaggaatggaaggtggtatgaatgagagaacattctggatacctgaccctcaccttcagcgttacactgcattggacagaaattcaaataaatttatgttttttaaagctttatttttatttgtacaagtgtttgtctgaatgtatctctgtgcaccaaatttgtccaatgtctccggaaccagagagtgtgttgggtcccctgggactggagttagacatagctgtgagctaccgtgtaggttctgggaatcggagcaggttctctggaagaccagccggcgaccttaattgctgagccatctctccagcccatgtttatctcattacaaaggctgtaaaggagctgcagttatgttttgtaatgaccagtgattattcttgactgtcagtaaccctgttcggcttccccaggggaagttgaaggcaggaacctgagacacgcattacctgcctccactgtccttcagttttgttttggctttttgtttgttttgttttttgctttcaagtaaggaaaatgatgcacctcatggcaatgccatgggtaaatacaaaataatgagtcagacttctgtgaggcttgccgtcaccccaaagttcaggcactttgtacagttgcactaccttccttcattttccagttgtctgttggataagacttttactaaatatgattagtacttctatgttaattctataggcacagtcttaagttttggccaggtatccccaaattcaccaaatgcttggaaactgaaccttaaggaaccgttctcatacatagcctgcaagttgggaacactcctagcattactagagaagtgagctgaggcagaaccaggattagaacatacaccatctgtgtgtgtatgccaaggtcaagacatggccagtatctcacacaaagaatgcagtaaggaacttccatgtctttgaagctgaagggaaaggaagagactcctgcatgaggcagaccccaagctaaattcttagactatttattagtgcaggctccacacttgtaaacacaggcagcctcatccctgctcggggttgttcattaactactgtggtgccggtttgagttcagcttcccattttaactgaactgagagttggagggaactggatgaacagggtgtcagtgcaagtgtgcattactgggcactaagtaggtcttcgtgtactgcagctattcacgttacaaccaccaccggagaccctcggttgtcacggtggtccatataccagctccaccagtatcatctacttcccagaatgcctcggcagcagccctattgggtcagaacctgctgctccatgttggctgtccagtgagcgtgagcagcattgactactcagcttctcccacactggctcctgggaggatgcgttacttttcttgagctatgaaacttgagatggctggttttgtcagtttagtgggttgaaagctgcctaggagtgagtgtcacttctgggtgaatgtgagggagtatgtggggctgaggagagtggacagcaccattgaatggccttgtagcccaggtggaacacaatttggactaagccggaggtgtgcccacatatccacacatactccctgatctgatgttgtatgaacagccatgcttctcacatgttcctgccacagtgttttgtaaagtcctcaggccaagtagccatgagctgaacctactgaaatcatgagacaaaaagttgtgtgtgtatgacctctgggcgagtccaagtgtccttcctatccctgcccccagttgtcctgtattgtcacttcctttgtctgtcagaattgatggtccttgctttgattttatgtctgaatataatttgtagtattagtggcatttatagttcttatttatttgcagtaaatacccttttgcatattaatgtttgggaggggaaaataagaccattagcaatatataataataatttttggctggcatttgtccataaaaaggacattcatgttgatttttcttcctttttgttctgagcgggaaatggtaaaagaggcttttttttttaaagctttatttatttcatatatgtgagtacactaatgctgtcttcagacacaccagaagagtgcatcagatcccgttacagatggtcatgagccaccatgtggttgctgggaattgaactcaggacctctggaagaacagtcagtgctcttaaccgctgagccatttctccagccccccccccctttttttaaagcaaagaaataattaactgagaattaaactcttgctaatgtcaccattttcatcttgaaaatcctttcattctgctttatctacctgatgaatttcagttgtcttaagaatgatttaacactgccaaatcttgatacttaaagtcctgctggaatcacactggttttttttttttttttttcatctcgagttttctaattactaaatctgcttttcttagcttaattggcagtcttgcctctgtgcttggcaggtgtgcttgcttacattggagctgagatgcactctctcaggatgtaattttccagtgccatgatgccagatgcatcctgggaaatcaagataagctggtgggccatttccctcaagcttctgccctgctgtgggctgagtctaccctggctgtctcagccctgctgtatttcacctggaaatgaggaaattacaaagtgacgagaatctgctaagcagagtcccttcaactgaaaatccctgatatcacccgactctccaaagtcacctgtgtttcctgaaactggcttagtccacgggttcttgtgggtgctttgtttagagaagaaattgaagggggaaggtgactttgcctttgaatccccatacacatgggccagcaaacaaggcctggaaggggatgatgtcattactcgtgggtacaattagctatgatgaagcccagacttcctcagacgtgggagttcgctaataccgttagtctctgaccagtatagagagagtcatgcaggcagggggattttctagacaactctaagaaagaagagagacgctggtgggagtgagaagacttgtagggctctacactagctgtagtgtagacatcctgacccaaactcttgggtacgtcgtactgcagagtcactgcagagaccccactcctcatccaccgtcagcagtgcctgacagttactgcagaggagtggaagatggactaagtcagaggcttctaatgtggtgttgtagaacacacttttccacactcctcttcctccacaggccgtgactgagtctttaaatactttcctagcttagcagttgagaactaggttctggcccagccatacaagctgaaattctgattccttcttgactggctatatgaactttattctgtcacgacctctcaactcatcttgtcatctatgaaatggcatgacagcgagggcagcaccacgtagaatcttaccagagtgcacagaatcctggtggcctgcactgtagatagatgctcagtgactgtgaagtgtccttttgtgactaaaaccttatcctggtcagaagaaaaatgtgagctcttgtccaactctgaaaagaacaaggcaaataaataactctttacaattctagatgtgagcctgcttgtttatttgtttgcttggagacaagatcttagcatgtaaccatggatagcctaaaacatgctatatagcccaggctggcctgtgtaggtttggtctacatagaattctaggctaacctcgagtagggtgaggttgtacattcctttttccaagctgaggctgaggcaagtgggtctctgtggactcagggccagcctggtatacttagagagttctaggacagctagggctacataggacctttatcaaaacaaaagaccaaagaggatagtgtagaactcactgccaccctcctgattgctctgcaccagtgcccctggcacatcctcctctaagaacattaaaatcagtttttacccagctgttttcattttgtttaggagtcttgcaagcggattattgagaattgtgaaatattgccagccattaccagtttattccaaatgcaaatgctcttgctatgatgaaaaatgatccaaaccccaaagccacactttaaccagttctcttcccttctccctcctcatcccaccgggaagaattccttgaccagaagtgcaccccttcccaatgactcccaggctcgcagcggggctcggtttcacacgtcttatgataaaagatacgtcatcaagaccattaccagtgaggacgtggcagagatgcacaacatcctgaagaagtaccaccaggtaacttccctaccttatagactcttggagcaggtttatcttcatgccagggtgtcttcaaggccaacactctgacctgtgcttggccaatgtaacaagaccacatctgacatgaagatcctccagcctcgggttccagagtgattgtggcccaattactggcccttaacataagaatgctatgtcccatttacataatagtcatctaaattatttaaaataaatttaatctaattatgcttccagtaatccccattctggttgtaaaaatcgcttcgataaggatctggcatctttccagaagattccttctgtgccagaaattagatgttaaccccaagtctgtatctgtttacactaccgaatcctgtgctgttctcactctctgacccttccaggactcatccgtgcccagtcagaccttgtagaaaattctttgttttagggaattttgtgtcactttctgccccatttgatccccaactattactactttgtaatctcctggggagatgcccttgggagctgctttctctttcctgagttaaatgccagcatagttttgcatgctggagcacagatccacaggtccaactggatcagtagaagtcgtctccctatgaaatagcaagaataccagatgcagaagcaagatagtcctcgacttagatcccagcccagtcacctgtggactgtgtggcttctggattttgagacctgtctcctcactgttttttttttttttttttctgtctcctcacttatacaatgaacgcatcaatacttcccaagtcctgagaattcagtgagacaacacaaagcatctgacatacactctgtgctcagcatatgacaagtgttagcaccggtgcttgtcatgcgactgtaaagttgaatgcctgtcatgttaccatagctaataagtcataatataatatataatataatataagtcaataatataataatgtcatgtgactgtaaagttgaacgcctgttatgccaccataactaataagtctcattataatatataagtcaataatatagtatatgtcgtgtaactgcaaagttgaatacctgtcatgttgccataactataataatataactcatcctgagaaattgagctcttgttgcacaaatgtcactgcttatgcagacattttagtaattgtcctcaaatgaggtatttataacacatgtatgcacatgcacaagtatgtatgcatacactcatgtgcacacacactttgtcgctttcagagtctgtctcagtctgcttggttgtattaacaaaacacaaatgagtggtttagatggcaaacatgttttgtttgcagttctagaggctgggaattttagatcagggaaccaatgtggtagaaatccagagaggtctctgctcctgcctgtgtacttagtgtctcctcgcttaggggagatggaaaaaattctatgctacttcctgctaagtgcaggaatcacatcagatccacagaatcatttaccacacactggtgataaggctttaaatgttttattcgtgtgtgtgtgtgtgtgtgtgtgtgtgtgtgcgtgagtgtgcatgcgcgtgtggatgctaactaagtaggtctggctgcctatggagcccagaaagaacatcagagcctgaagctggagttgcagggtgttgagctgcctgactacaggtgcttgctaggtgccaatctgctcttctggaagagcagcaagtactcttaacaattaagccattattctagcctgtgattaagatttaaaactatgcatgttgagggaacacaaatagtctagatttttgctttgctttttacttaaatagctttaaattccccctcagccgtacttactatcacagagaatgttcaaagtaaagctttgtgagccctgactgcatcagattaggattcacaaaggttacgtcacatctgccacatatcagcctctcctaccgtgttctctgaagacagctctctgtatctgtgagctctgatggcttatttaacgtgttacttttggtcatgctctactccctaatgtggcaggttgtttcttggcaataactattcttccagtctttgcaaatgtgatgaaccaaatttcacttagagtgaggtctataaaagccttcacattgtgttctgtctctggaagcctgtgactgcctctaatgtgctttctgaaggcatcagtctacctttaaattcatttaacatctaatacatctttgataatggctatggctttcgaaatttgttctgccatgcttatgctattgcccgttataaaacaacttttgaagtgcccagctaatccctgtgaaagcaaatgcattggctctgaagcacctgagttccagcccaggcttcaagcccctcacagtttcatatgctcccctatctggaataggatatcacacacatgcatctctttatgctttggcttgttctggaactgctcaaagcaaattggcttttcctgacaagtgagaatatattcttcaaataaacagcaaggatgcctttcttttgaaatgggacatatggctcaggtgtccagttcttgccgagcctaggctcagagtgaatctttcaactttacagaaatcacagttggaggtgttttctggttatttggtatgataaaagatcccagccagcagcaacttaaggaaaaggcttgtcttttagttccaggttatagtctacccctgagaagaggtcaagacagggactcagggtagttagtcacataatatccagtcaaaacgggagagaaataaatgcacccctggaacttgctcatccggtcggctcttttcatatttctgtagtttagggcctcttgcctagggatggtcctacccgcagtgtgctaggtcaattaacagtcaaggcagttcccccacagagatgtccatagaccagtctcgtaaaattctctttccaggtgacgttagattatgttgagttgaccataagactaaccagcacaaggtgttttctgggggtatttgctgcgatgacacacaattcagacatatccccagtattatgtaatcacattgggcttcaggacagttgctgacacacttcaagatcactcacagtactgaggtttcttttgactccactgctaaaatacaaaactttttttttttttttggtatggtcttcattcagaaaagtcacatttagccaacatctgggtttttctcccatcttagaaagtgatactttagagatactgtaaggcatctcatgactgagaaccaccagtcttaatccagtttacttaaaggacactaaattggaatcagatgatgtagagcctagctggttatgaactggctgtttaatctgatctgtgagctcaaatttcccatctctgttccatttcattaactcatccagctaggcattgacccatgaccatgttccagaaaagatttgaattcaccttcagagaagtaaaggtaagacaaattcaaaaagcaaaaaagggcagagagtgtggataaaaaggaaagcatctaattgcaacttaaaataagcctgaaacttgttgatcagtcttcgaagcattttagaacacttgccatctggagttctgtcagtttgagcttagctgcctggtagttaaggggcaccctgagtaagtcatctgtgtagctatctgaacatagttaagcctgttgctttcttagagtagagtagagtagagtagagtagagtagagtagagtagagctgcccttgatatgggatacgagggagttgttttgtaagacacatgacccttaaacagcatctttacagaggcacagtatacacagggatatcacagatcaaaaactcaggtgacagcagatgctggagatctggagaaagaggaacactcctccattgctggtgggattgcatgctgatacaacaactctggaattcagtctggcggttcctcagaaaattagacatagtaataccgaaatatccaacaattcctttcctgggcatatagccagaagatgttccaacttataagaaggacacatgctccactatgatcatagcagccttatttataatagtcataagctagaaagaacccagatgtccctcagcacaggaatggatacagaaaatgtggtacatttacacagtggagtactactcagctattaaaaagaatgaatttatgaaattcctaggcaaatggatggacctggagggtatcatcctgagtgaggtaacccaatcccaaaagaacgcacatgatatgcactcactgataagcagatattagcccagaaacttagaatatttaagatacaatttgcaaaacacaagaatctcaagaagaaggaagaccaaagtgtgggttcttcgttccttcttagaatggggaacaaaatacccatggaaggagttacagagacaaagatcggagctgagagggaaggaaggagcattaagtactgttcttatccttaatttcttagatcccatttttgaaattgtgtgctgtttggtcattgactcctttagtccactagggggggtggttccagtagtgggtgatgctgatgcaaactgagaggttttaaccttcagttcttctcggttccattgttgtccttatcctgctgagagtccactctgctcaactaactgaatcttctctttgatttttctcttttgtatatttgggtaaaagatactttgtaaatatgcttttgttcaactctctgttgactctgacactctcaggtcttacaaatgatggttaattatcacctgtttttgctaagcagtgtcagaagagtatgtaaaaatgaggctggggaggtagtgcaggggtggaacatttaacagctttttttttaaattaggtattttcttcatttacatttcaaatgctattccaaaagtcccccacaccctcctcctccactcccctacccacccactcccacttcttggccctggcattccctcatactgaggcatataaagtttgcaagaccaaggggcctctcttcccaataatggccaactaggccatcttcagctacatatgcagctagagacacaagctcggggggtggggggggggggttctggttagttcatatcgttgttccacttatagggttgcagacccctttagcttctagggtactttctctagctcctccactgggcgacctgtgatccatccaatagctgactttgagcatccacttctgtgtttgctaggccctggcatagcctcacaagagacagctatatcagggtcctttcagcaaaatcttgctagtgtatgcaatgatgtcagcgtttggaggctgattatgggatggatccccgggtatggcagtctctagatggtccatcctttcatctcaactcgaaactttggctctgtaactccttccatgggtgttttgttcccaattctaagaaggggcaaactgtccacactttgatcttcgttcttcttaagtttcatgtgttttgcaaattgtatcttatatcttgggtattctaagtttctgggctaatatccatttttcagtgagtacatatcatgtgagttcttttgtgattgggttacctcactcaggatgatgccctccaggtccatccatttgcctagaaatttcataaatttcactctttttaatagctgagtagtagtccattgtgtaaatgtaccacattttctgtatccattgctctgttgaggggcatctgggttctttccagcttctggctattataaataaggctgctatgcaaatagtggagcatgcatctttcttaccagttggaacatcttctggatatatgcccaggagaggtattgcaggatcctccagtagttctatgtccaattttctgaggaactgccaaactgattttcagaatggttgtaccagcttggaatcccaccaacaatggaggagtgttcttctttttccacatcctcgccagcatctgctgtcacctgaatttttcatcttagccattctgactggtatgaggtggaatctcagggttgttttgatgtgcatttccctgatgattaaggatgttgaacattttttcaggtgcttctcagccattcggtattcctcaggtgagaattctttgtttagctctgagcctcattttttaatggggttatttgattttctggagtctaccttcttcagttctttatatatattggatattagtcctctatatgatttaggattggtaacgatcctttcccaatctgttggtggccttttggtcttattgacagtgtcttttgctttacagaagctttgcaattttatgaggtcccatttgtcgattctcgatcttacagcacaagccattgctgttctattcaggaatttttctcctgtgcccatatcttcgaggcttttccccactttctcctctataagtttcactgtctctggttttatatggagttccttgatccacttagatttgaccttagtacaaggagatagggatggatcaattcgcattcttctacatgataaccgccagttgtgccagcaccatttgttgaaaatgctgtctttttcccacaggatggttttagctcccttgtcaaagatcaagtgaccataggagtgtgggttcatctctgggtcttcaattctgttccattggtctacttgtctgtcgctataccagtaccatgcagtttttatcacaattgctctgtagtacagctttaggtcaggcatggtgattccaccagaggttcttttatcattgagaagagtttttgctatcctagctttttttgttattccgtgtgaatttgcaaattgtcctaattcattgaagaattgagttggaattttgattgggattgcattgaatctgtagattgctttgggcaagatagccatttttactatattgatcctgccaatccatatgcatgggagatcttttcattttcttagatctttaatttctttcttcagagacatgaatttcttatcatacagatatttcacttccttagttagagtcacgccaaggtattttatattatttgtgactattgtgaagggtgttgtttccctaatttctttctcagcctttttatccattatgtagagaaaggccattgacttgtttgagttaattttatatccagctacttcagtgaagctgtttttcaggtttaggagtcctctggtggaatttttagggtcacttatatatactatcatatcatctgcaaaaagtgatattttgacttcttcctttccaatttgtatccccttggtctccttttgttgtcgaattactctggctagaacttcaagtactatatagaataggtagggagaaagtgggcagccttgtctagtccctgactttagtggaattgcttccagcttctcaccatttactttgatgttggctactaatttgctgtagattgcttttatcatgtttaggtatgggcctcgaattcctgatctttccaagacatttatcatgaatgggtgttggattttgtcaaatgctttctctgcatctaacgagatgatcatgtggtttttgtctttgagtttgtttatatagtggattacgttgatggatttccgtatattaaaccatccttgcatcccaggaatgaaacctacttggtcaggatggatgattgttttgatgtgttcttggatttggttagcgagaattttattgagtatttttgcatcgataatcataagggaaattggtctgaagttctctacttggttgatttcgcccctgagtttgattatttcctgctgtctactcctcttgggtgcatttgcttccttttgttctagagcttttaggtgtgttgtcaagctgctagcgtgtgctctctctagtttctttatggaggcactcaaagctatgagttttcctcttagaaatgctttcattgtgtcccataagtttgggtatgttgtggcttcattttcattaaaatctaaaaagtctttaatttctttctttattccttccttgaccaaggtatcattgagaagagtgttgttccgtttccacgtgaatgttggctttccattatctatgttgttattgaagatcagccttagtccatggtgatctgataggatgcatgggacaatttcaatatttttgtatctgttgaggcctgttttgtgaccaattatatggtcaattttggagaaggtaccatgaggtgctgagaagaatgtatatccttttggtttaggataaaatgttctgtagatatctgttcaatctatttgtttcataacttctgttagtttcactgtgtccctgtttagtttctgtttccatgatctgttcattggtgagagtggggtgttgaaatctcccactattattgtgtgagatgcaatgtgtgctttgaactttactaaagtttctttaataaatgtggctgcccttgcatttggagcatagatattcagaattgagagttcctcttggaagattttacctttgatgagtatgaagtgtccctccttgtcttttttgataacttttggttggaagtcgattttattcaatattagaatggctactccaccttgtttcttcaggccatttgcttggaaaattgttttccagcctttcattctgaggtagtgtctgtctttttccctgggatgggtttcctgtaagcagcaaaatgttgggtcctgtttgtgtagccagtctgttagtctatgtctttttattggggaattgagtccattgatattaagagatattaaggaaaagtaattgttgcttcctattatttttgttgttaaagttggcattctgttcttgtggctgtcttcttttaggtttgttgaaggattactttcttgctttttctagggtgtcgtttccatccttttattgttttttttttttttctgttgttatcctttgaagggctggattcatcgaaagataatgtgtgaatttggttttgtcgtggaatactttggtttctccatctatggtaattgaaagtttggctgggtatagtagcctgggctggcatttgtgttctcttagtgtctgtataacatctgtccaggctcttctggctttcatagtctctggtgaaaagtctggtgtgattctaataggcctgcctttatatgttacttgaccttttttccttattgcttttaatattctatctttatttggtgtttttttgttctgattattatgtgtcaggaggaatttcttttctagtccagtctatttggagttctgtaggcttcttgtatgttcatgggcatctctttctttaggcatgggaagttttcttctataattttgttgaagatatttgctggccctttaagttgaaaatcttctttctcgtctactcctattatatgtaggttttgtcttctcattgtgtcctaaatttcctagatgttttgactcaggatctttttgcattttgcattttctttgattgttgtgccgatgttctctatgtaatcttctgcacctgagattctctcttccatctcttgtattctgttgctaatgctcgcatctatggttctagatttttttccctagggtttctatctccagggttgcctcactttgggttttctttattgtgtctacttcactttttaggtcttgtatgattttgttcaattccaccacctgtttggttgtgttttcctgtttttctctaaggatttgtactgtacctctttagcagtgttctcctgtatttctttaagtgagttattaaagtccttcttgatgtcctctaccatcatcatgagatatgctttaaaatccgggtctagccttttgggtgtgttggggtttccaggatgggctgaggtgggagtgttgggttctgatgatggtgagtggtcttggtttctgttagtaagattcttacgtttgcctttagccatctgttaatctctggaattagttgttatagttgactctggttagagcttgttcctcttatgattctgttagcctctatcagcagacctgggagactagatctctcctgagtttcagtggtcagagtaccctctgcaggctagctcttctcttgcagggaaggtgcacagatatctgatgtttagatctgcctcctggcagaagatgaaggcccgaaacagggcctgtcccagaagctgtgttgcttctgcctgttccagaagctgtgtagcttttgtagtgggcactctcacctacacagtctagtctctgagagttcccggaccagagatggctcccccaggtgctccggcatagccctcccaggcagggcggacacctctcctctggcagggaaggtgcccggatgtctggagcccgaaacgggggtctgccccagaagttgtgtcacttctgcctttccccgaagctgttagcttctatagtccacactctcacctgtgtagaatagtctctgagggatccaggaaccaagatgactcccccaggtcaacagctttttattatttgctttttttttttttttttttacattctttgtcttggattttggagacaaagtttcactatgtaactcaggctggctgtaacatcacgtatccactttggagcagaaggcaggacacagcaagcagcagtcacttatgttagaaatgccagttatagccagacctaatggctgcatattaaaaaaaaaacttttgaggacactctgagaataaaacagaagccatgacataatccataatgcaggcaggtagcatgttgtaagcagtgtttaataaaaataattttaatgcaagcataggtaatgtgatgaattcctatggagaatatagaatcggatcccaggaatacagcaattaagtcagccccaagaatagatgatagaaaatttagttgttaaaattagggaaccagtattcagcatctactgatccaagctcaggtcatggatgtgatacaagccctgaaaaccacatgggccacaggggcttctttgatgttgcagaagagtttgatgacattagaggccaagaaggatagacttaatggttagcacctgggcccatcaagaaatacctcccagagaatgccagctttgagtagccactgggagcagccctctcaacctttgtatagatggcacctcagatgtaatgtagcccattctaacctcaaactcaaggtttcacttcccaagtgtggggataacaggtgtgtaccaccatacctgactacttttctatattttaatgtggaaattaagcataaagaagagaaaaaataaaagactcctcacattgtccctgtacctgtaaacagtggtaggaatgattggatgctaaagatgttttgactcatttttttaaaggcactaaacaatagatactaaagaaaaaaatcatggcatgtggtatccagtacacctgcttgttgttcttgaagcgtttgaacaaattattttcctaattcacctgaagtctttaaagggaagttcttagctgttacctaaaagtagaagaatggagcaataaattttgaatataaattttatatctataagacattgtcttacctggtacatatacggagcattattcgtttatgaaaataccttacagatattccttgaaacagggaactcctgccatttgtttaaaatgtgatgtgaccattagctggactagcaaaaagtctcagtggacaaagagcctgctgtgtaagcttgtattcctgagctgcatcctcagaacccatgaaaagccagatgggaaggcacttctctataatcctggcaaggtggaaggtgcagaggggagaatcctcagaagtgtgccagccagctagcctggtacccaactgtgctcgggagaccctgcctcaaggatccaaaggagagatgctgcacctctgcctccacaccaaggcatgcttatgcctgtaacacgcatgtatgcaggcatgcacaccataaaaaactatgtctctgtgtaaccatttccctgagaatgttttaggtgaggtcccctggttcttttgggggttctccccctcttgtttcctctccttttttgtaaaaagaaaaaatatataatatttactttatgtatgtgagtacactgttgctgtcttcagacacaccagaagagggcatcatatcccattacagatggttgtgagccaccatgtgcttactgggaattgaacttcgggcctctggaagagcagtcagtgcagcacttttaaccgccgagccatctctccagcccatgtttcctcttactccctccctgctaagtcttctccctctgcacattttggtctttgttctctgaggctctctgtctttatattcagtcttcagcctagaacattggtttttgttttgtttgttttgtttttgtaaggacaggtctcactacatcgcccaaactgaccttgaactcagtcttcacgattcagccttcctagagatgtgtaccaccacacccacctagcacagggcagctcaaaagcaccaggtttctccctagttcctgtggaggacagaagtttccttcctagtcactgtgaaaaaaagcaaggatggagagggaaaggaggtacccatggatttttctacatcatcctgtggcttgcaaggtcatcatttgccatcttagtaagtttttacatacttggagaaattgggaaattttccagcattaattctgtataagtcatccaatggtctgtgactcagctgcctttccttgcacatgcaatcttcacatgatacctacaatgcccagaatgagagcatactgagcagttttcctcagcaacatagctgtacaacatgtaagctgtggctcttaccagagttgtccatgggatggttaaccagagttaaccagagttaaccatgggatagcagtttccatattctttgaccatgttctgtgatacttctagaatggttagtttcagttgtcagcttgtcacagtgtaggatgacctcggaatgcagtctcagtaagacactatctagattaggttggcctgtgggcatgtctgtgagagcgcctagtagtgagtgcttagagggaagactcacccactatgggtggcaccattacctaggcagggaatcctgaattgtgaagtggataaagtgatatgcaggctagcatgcatgcatgcatgcatgtgtgtgtgcattcattcaatcattcattcattcattcattgctctctgctttagagtgagtcgggtatggctaatcacttcctcttcctgctgccttgacttccccgcagtgatggactgtaacctggaacagtgagccatgtaaaccttttctcccttgagttactcatgtaactctgggctgcagagttaccgaaggtgaagctgagacgctctgtcctcctgtggctgacacaaaccttcgttttccttataggatgtgctttatttattatgtcatcaagagattcctgagcattccccctcgtttataaatcaagttggactttagcacccctgcttccaaaatctagaacattcagatttctaatgccaagttaagtaagaatcctaatgcaattgtgaacaaagagtttgtttgtagtgtatacggcagagtatttgtaagatgtacctggggtcatttctcttttttttttttttttagtgtatgggtgttttgcctgcttgtgtgtctttgcaccctgtgcatgcctggtacccacagaagccaaaagagaatgcctgaacccctggaactgaagtcacagataactgttagatgccatgtgggtgcagggaatctagcttgggtcctctggaagagcaccaagcacacttaaccagtgaaccatctctccagccctctgttttctgaatttgctcattgtgtttattcatcaaatgctcttgacatgctagacacacgtgctgggatttgatcatgaacaaaatagaaacggggtctcttcacggagcttatcgtgtgcaaagatgctacttgactgagtagagaatcctatgtgactaaacctggaaagatgactgttggctggaatgataagcttctgggctgcagagaatgaatgggggagatgaggtgcctacatatcgtgtggagtgggaaggtgagaagaatgacttttgttgaggctctgagccatatgtgtaggcacacaatggaggaagaagccagacaggaacctggcaagttgagaacaggcagcagtgcccttgcttcagcacccgcactgcgcagctatggcgctctctcagatccccatccagaactccagccagtgggtagaatgttctctccttcagaactcctggtccttaggtctttctagactaatagtatcaaatgcagtttggcaacgctgatacggtaaaagacaggctttgatataatttgtgggctcgtttgtttatacactcgggagttggaagttcatttcatctgtgttcatcaaagagccccatgggaaaagtaagtacagctgacactcgtgaacaaaatgcatccgagttgattgtttgtgccccactatctactctggaggcaaggaaattgtagtgtataacctgtgtgggcatatttccaaaactgaagcttgtcagttccccgagtactgctccttagcattggtcactatgggtggtaccacggtgagccaggctgtctgtggctgtgtacagatctccatcttggcattccttgttgtttgtggtactagggatggaccctttggctgaaaggtcatgtgctttatcaaggataagaatgtgagtggaggagttgatcagccagtaccggcctcaagggaaaaatccaggtatgcaagatgatgcttgccgtagagtgagccgcagagcagacttgactgttagacgttccaagcaagggagagatcggtgtgatgttccagtttcctacctaggtcttgagtgacagctaacatcacgtcattgataagtgttcagtacagactggtgtggggtcttttgacatcctctaacttgccatcctcacagctgtttgggtactcagtttctggaagatgaaactaagactgctcatccaccttctactactggcaaacaacacactttttaatcccttcaattgctgtgggaaatttccttttcaaccgagaactattaaccacctgttgtgcattagcaaacctcaagtccatttattggtttgaaattaagctccactcatctgatttcaagtaacaagctgaggagaaactccgtgggaaaaaaaaaaatagactgagctcaaatatacatctcagctgttacctgtaaggcaggggaaatctgaagcatcttggacatctgtcaggactgcagaactaaaaccagctgcagtgacagatgctgtgtagctccaatgagcaagattgagaacttttttcttctttcgctaattaaatattcctagagttgattactaataatgtttatcactaaaaaatccaattagaatgtttttgttaaagtgttgttgttgttgttgttgttgtttaaatcaaacagtgtaaccctttttaaagactcaaaataggggttaaagagatgactctgtgacttgttttgtaaagatcaagtttgaatccccgatgcccatgtaaaaagccaagcatgggagcgtgtacctgtaacctcagcactgaggtacatgtatgcaatacacatgcacatgcacacaggcacactccccagaataatccaaaatacaacccttaaaacattggtagtcatccttccaggcatctggtgcaggcaaatgggtagggtgtttacaacattggatttggggtgttggtactatgctggaggtttaatctgtgtcatgggctcatttagacacacacacacaaaaggctcatttagacacacacacacactcacacacacacacccattttaaaggtccctgtggtagtttatcaatggctacttccaagaggaagtagctccctcttgtggctcattggcgtatgacccaagtcatgctgtgtttttgcaaccctgggacttgatggcacctagcacctagtcaaagaaagctgacttgtcgttaactcagggccccttcatacccactgaaatcaagatggaaagcagaacacccaagcttccagcaccagactcccagcatcctcttcttcaccctctgcctcactaccctcaaaggtcttgatctagtggtgaatcattctcaggggagggggaggaggacagaggtggacagtccttcacttcaaaggggtttcctttcttgccttgagccactgtgttcaattttgacattacagattagttgggctactaggaaaagaatatctttagtggtaagattaaatgttcagatttatatatagagagagaacacagatctgataggtgagcagcataaagcagcttaaatgttttccgaaaataaaacctcaagaattggacatttctactttatataaacgatacaccacgttttgacagctacttttcctttctctctctcctatacagtatatagtggaatgtcatggggtcacacttcttcctcagttcttgggaatgtaccggcttaatgtcgatggagtggaaatatatgtgattgttacaaggaatgtgttcagccaccggctatctgtatataggaaatacgacttaaaggtgaggttgactttgataattttcaataagtttcacgttcatttgcacaagcctactcgcccatattgtttatgttatcatgtgaacaaaatggtcagggtgcttcaagagcttgaatctagcaggcagttgccagcacgtaggattaagcagcccatgttattacaagcatgtcagccacatgccatgtagtaccacatgccatgtagtagctaagtgctggggatagtttatgagttaaacagaccagggacagcaaggtggcccagcaggtaaactgggggcacttgccccctaagcctcatagcccaaggtcactcttcagaatccaggctagaaggaaagaattggttcccagaagttggcctcctgtcctctacttcacgtgcataaaacacacacatacgatgataaaagaaaaccgaacagatctttaagtagggatgattactatcattattattgattattattgataaataatgagcgctgtggatggaaatgaacggggggaacgtcacactagtttttattaacagtaaacaagcactctactactaagccacaatctcagccagttttcctcttattttgagacaaggttagcccaggctagcattgaactcatccagaagccaacacagaccttgagtgttaacaccttgcctcagcttgcctagtgcctgggaccacaggcctgtaccaccaggcctaccaaggcatacatttccagctaggatgttaggtaaggtgcatctggaagggtggcattggtcccatctcaagagaaatgacaaagggaaaagcctgagatcagacataccaacaatttaaaatgagaccactggagaattctgaattcagtgacatgacctgacttttagacagccaactctgacagtgtatgtatgccaagaccaagaggggttgcatctttataaagttctgttgctgtgtcatcacgtgcatggtttctgtgttatctatgctctcacactgtacggggcaccgtgagcagtgaccagagatactgtatggaccatgaggctaagatatttactctctgaccctgaaaaagttcatcttcccctgatctgtggtactcagttctaaggattttggttttttgtttgtttgtttgtttggttggttggttggttggttggttgttttgttttgtttaatcttaggattcattcacatgcacaaaagagcaccctaaaaagctttgccttctgttggttatgtctagatatctacagtattagaaatagaagcagggctggagagatggctctgcagttaagagtacttgctgctcttccagaggacacgaatttagttcccaggatctggcggctcataaccacctttaactcccacttccagggggtctgacaccctcttctggtcgcccccataaacccttacatataaatatataggctcccttgtattcccttacatataaataagaataaatctttgcttgaaagaaatttatgagaaacactaaactattgatatttatagttattttaaataatattaaactactacatattaatgaatttttatgacagctgtatttttcaaaagcaaaatattagtgagtcaagcctcatggttttacagttctttctattaattaattaatttatttattcacctcacatctggaattctgcaccccttcctcccctcacacagctcacccccatggctttacattttgttttagttaaatgtgtcctttggctttcgtgtttgtatatggtgcactcctcccgacgcctccttccctcctagtcctctcctgcccctgatttcagggctctgtactgtgtggattcattagggacagttgaaatgtcctgtccgatcctgctgtcaatacttagcggtatttgcatgagtaactgggaaaaacagctgagtccacacaaatgtgtagttgggaaggagagatgtggagtttggggagtaattgtagatattctttaataacacaccaagacttaatgtcagtgctatcttagttagcctggagcatttgtaccctgttcattaatacccgtggtcagttgcaagcactggtcccagtgtgtggttttatagtcatacctgtttcactggagacatagcggttccttaattaacacaggttctcttaatgttgacatattgaattacagagtatcaaaaatcatgtgaccatccctactggtcacatagaaagccttccatgcatgggaacctgagggcagatacagttttccaaaagtctggttttcatttggtagcccattaccactgacctcaaagtcccatcagccatgctggaaatgacagaacccagctcctccagggcacagagccttgcagtttcagtcactgtcaaaaagtgtccgtttctcaggtctggacaaatacagtttatttgtcatttcttttttcggatacaaatgttgctttatggacgagaaggtgtctgtttcggccataactgttcctgtcaggaaaatgactctgagcagcattcattgctgaaacagacatgctctctgcatggctctgttcagaatgcgaaaggtgtgtgcttcagagtcaagacccttcactgctttatcagggacttttcattcagttgctaggggtttgtggtatctccatgacagatactcctcactgcttcataggacagagcccactgtgtgtgtgcaatgtccttgtgactatcaagagtaaagagacaagtagtgcctcagtgttacaaaaacagttttgtcagatgtggttgttgtgctggtaacctcagcaatcaaaaggctgaggcaggaggatcacaagttcaaggccagcctgagctacaaatttcaagccagattttaaatgcagatgtggtcctgtctcagaacaaacatcaaacaagcaagagctttgacttgcaggcctctgagagtacctcaggattctgagccacacttgaagaaatgctagagtaaatcaagagcagccttgtgtctgctctctaaatcccagacagcgatcacaattcaagccattttattgccttgggattgcctccggggcatcccagccacaccccgttctctcatttggcacctgctctttcccagtgtctggagctacaccactcacaggctctaatggaaatttcagggttctagatggtgctctgactgtcccatgccagaaagccagtgtggccttaggagcctcatgaagttagtaactgttcagttagcaactgttgcaagttgctggacctttgagcctctgtttcctggtctgttgcagcaggaatagttttatctgctcttggaggatgcattaaataagatgcagacatagcctatcagcataaggcacagcataaaggaactgggggcctgaatgccctacctaatattcattcccttgaaatgcctaagatagcactgccttcaagtaagcctacctagatgtaagttgcatttgtagattggccacagtgctgtgattggcgtagcatccctctttgcttagttatcgctctctttcccttacagaacaacacactgttcctgccagaggcctcgggtgcatggaaaccatgattcccattcaaggccttaacttcttaatgttttattttgatttttttttttttactgtgcattaattcagttttaaagtctgccccctaccccatgcacacacaccagctgatgacattattttacatagaattaaaatattttcaaaaatgaaaaggagagtcaatttcatgtaggagagaaaacatacatagaccaacaaaaaaaaaaaaggtacaaatgtagggatcagggagatggctcagttaggaacgaactggaggggcctgggtttgattttcagaacccacatttaaacgccatgcgtggcagcacttgcttgtaaacctagtgttgaggtgggggagggaggacaggaagatccctggggcgccaagtcctgtcagcccagcttaatcagcaagccctcggtgccagtccaaagtaaaataaaataaaaggaaatggcccaaacaacctccagggttacccttagccccagaaacagtgcacacatacatacttatacatacagtacacacgcacgcgcgcacacacacacaggttacaaaagtagaattgcttcctcctctgcccaataccctaggcagtgctcaagagttacagacaccttctcagtgagagagagagagagagagagagagagagagagagagagagagagagaattgttataaggcagtgtacagaggaaagaaagatgttagtgacccatattcagcaaccctaactagacagtgtcttcctttgacgttattggtttgcagttccaggttcctcgcaggcctcattgtgggaatgccaaggtgacaggcacctgaagttactgaacacattacacccacagtctagaacagatagtaatgaatgtgtgcatgcgtgcacacttctgctcagtgtgcttttcatacaatccaggatcctctgccttaggaatagggtcacccacagtaggaagggcttcctatctcgattaacataatcaagataatctcccacagagatgctcacagacagtccctcgttaagactttttcctcagatttttctagattacgataagttgacaataaagactagccatcactggtagaaagcggacctggcctggtggtgtcggagcacgcctttaatcccaactgtgctggaatagaccctcatgtggcaactccgcctggtgcttctctggcttgctccccaagcaactctgggctactcaccagggccttgaaagccaccagtcctacatgccaagtgccaggcagtcatgaactgacactggggtgtctcaagcttgctcctgttcccgcttccgaattttgggacaccacacacccacacccacaccctgctgctgccagtttctgcatctgtgtgcacatatcagtagagaggtgttatggggagggtttttttttctccttatctaaccaactgctctgttcaaatcaagtatgagttccctttgtgattggtgacttttatgatccaggataatagttgtgtgtctgagcagtgaccaagttagcaaaacactccactgtagcagttcaggcatctggtgccaggcagaacaagtcagaaactctgatccttctccagccacttgtcagtaaacacagagtcggccatgggtgagccacaggttgttgaattcacatatttagaaatctaaagtaagactcgacttgtctatgtgctccatagcttttctttatgaattaaaatcccctgcaaaaaggaaagtttctctgcttgagagcactgcctcctggggatttcagaagtgacttcctgcctcccatcaggcatttggccagcacatctctgaggatgcttttgaaaacctgtgccatagactaggtgctgtggagatcaaggactgtgttttatcccactttgtaccccagtgctcggcatagggcctagaacaaaagaggtgtaaggaagcctgtagctttgaaggaatctccaaaaggagtcagtgctcacaggggatgagctcagagctcagtggagctgtccttcagtaacacactggggagagtacagcgagtgtgtggtacagacaaggctgtcagaggcaggatggtccacatctggaggttggatatggggaaagggcatccaatgcttttgtggccccagccatctgatagcctacctcccttttgaagatagtgaaacctttcatgttttgatcaatgcatagcaagtttattcctcaagtgatggcaggttgtccgacttccaagaaggtaggtaagagtctgagaatgacaagtctggcaacagtgacagggatttggttggagaagagtgggcagtagacaggaacacttgcagggggagccacagaccagacaagggcttttggaacaaggggggcatgctgaggctggacctagggcagagctagcttttcttctccgttctgcccggaaccacttacatactgtgtccatgggaaaccaagcatcccatgaagtccattcttaaccatttctttgtgtttcagggctcgacagtggctagagaagctagtgataaagaaaaggtaagcatggtggtgccctccctggcccaggagtggggctgtacagtgtttttgtccattcttctcataccccaacaacgtgttgctgccgccagcacaagtagcaatccctgcagcctaggaatgcatgccttcatcccctttcctcagtggctagggatgcacagttactagttactagttgtgtgtgtggttgacagaaatgggtcacatgccaccttctctgcacatactgtaaagttagctgaagtggaactctggctcagagtgtgagctctgggctcccaagccctctttcccccattagaccctgactctgactgtgttctttgcctcttctttgtcctttttattggccattgcataccagtttttcaagtatacagtggtagggttggttttgctttttaaaatgagagatgaaagactacatctttgtatctcctgacttactgggaatcaagtaagacttaaatctcatttggtttcttttaacagaattaacagacttgaagggtcaggctgttaggagtattatcaagaggtctttccgtcttaaaagtttcagtatacaatgttcagaattggtaaatacgacatgagatcaggaaagaaaatgttccctggtagagatgatttggacaaagagggaaggattcagaagaaagagtggcaagtcctgcagagaccactgagccctttaggaggctagctagagggacatgacacataacaggctccagggggaatccataggccagaggcaagaccagtgcagtagcccctaggtggggcctgggttcgttggtgtacacagctagccacaccacagagagatttggtggtgggaaaaaaaatagagaacaaattcatttattcagatcaaatgccggaggtgattgggacagggtgtgtctcgagggaggctgtgaaagacaactcaccttcttcaggcctgaccacaggatctttgcacctgaaccacagcagcaggcaaagactttggaatgcaagtgtagcagaacagaggtgtccacgggcatttgaggctgaccaggggtcctggcgaagaaagggcagtcagcataagacgggctcaaatctcccaaggaaggaatgctgggtgcgagagagtcctgctactaccagccacagccagacgagcaagagcctcagtcattcagtcaagcacctgttgggcatctgtggtaagcaggtgctggccaggctgtagagggcatgccacacaagaaggtggataggagcagaagccagactgcagtggtgaagaagtgtggcagagagcaggacacagtggctgccccttgtatttttactgagtgtgtatttttatgtttcatccaggctcccttgaagatgctaagaaccagcaacaatgactcttaaattccgggttgctgaatgagcgtttctttcaagctcaaacactcgagcaaagtatctaacttttagcatatgagtttttagaggttgtacattattgagactctatatttttgagaaaaaatatgtaattatttaaagggccatacatacactcccaaatcttagccacagagtggcccaggaaagaagacatagacaaggtaacatttgtactccgtgatagttgcttggtttcttcaacaccaccaccctgcttccatcaccaagaccctagagaccatgtcaggcattggttttgatatcttcagcctccatctataaggggtgttccagcaatagccaaacctaagaaaaacccctgtaactcagggttggtggcaagcaggtgtatataagggagagcacagacattttactctgatattttacaactgtgacacttccttacatcaggcaccgatgtgccttagggccacatgctttctagaagccagcagcagccacagttcccctgccctcctccctaaagctctttagcccctagaatagagaatttggctaagcagaggttccttgcctcaagcctccaataggacgtgcttgggacttgggagtgtgggaggtcagaacccaactgtgagtagctgagagaagctgctgtccctgagcactgtcacaagctgttgtcacaagctgttgtcactgtcttcctcctccacccctcttcaaaggccagcccctctccccaaccctacctcctgaaaagagctagagggcctcaccagcagggttcagagctgtctggcttcactccctcaacctctgcccctaaacctaggcttctggttggtggcacagcagaaactttcccttgccctgggatgtacttctatctgatgtcattatattgggatgcaggggactgtcaagcatttggtcagatcctcttcatgttaaagacagtgcaggggttattttctgagtcagtggaattatttctgaagtcgaaacttaagggttctttggaaagtcatctgtgttagatatttttctgggacaaacatgtaaaggagtgttttcctaaagtagacacagataaatgactaagatagactcaggaaggaacatttcgttaaagcagacacaagagaaaggatgctctgctaaagcaagcatgtgaaggacacgtgatgaaggattcttcgctaacaacacacatggattggtccgccatgctttgaatcattgagctgcatttgtcgggactccacagagagaaacacaccgaaaaacttctagagtgtgctgcagtttccaactgattggcagagtgatgtgggctgtacagactcacatgctgaggcaagacccgtggtggacatgtgatgtttggaggacgcaagctgagcttggcttgcttatagtctcatgggtctctcgtcttcactgatctccacttcgctgagagaggcacagctgagaacttctcctggtgttcctcctggcctggctgcctctgccaaggagtgccactgctgctgattcctgtttgccaccccaagtctgccaagctggacagctggtatatccatgaagtatttgcgattggatctagttgccgccgctgaagctagtgaattaaactgctgatttcctgacaacacagataggcaagacactgcagcacaccaccagaagttcgtgtgtgtgtgcgtttctctctatggagtccagacaaatggaactcaactacacaatgtaagatggaccaattcatgtgtgatgtcctccatcacctgcttgcttaagcagaacagcctttcactgtggctgcctcagccaaacgttccttcccaagtctgccttagcctttcacctgtgtccacttcaggaaaccactccttcctgtgtttccactaacaaaacaccgtccaacacaactgactttccaaagaacccttaagtttccatttcaatttcacacatgggtttgataccttgtccaaggccatacagttagtaagtgagtgtccgagagtgagccctagggactcctagcaccagagctcacatgtcaaatctctgtgaatgacgccttctcagtgtctgggatcctactgtggcttctgtggctcctttttttcttatttatttattcactctacattccaatatcagctctcctcttcccctccctccttgcacagcccatgagggttggagaaactccaagtgtgggttacagcagaggaaaggcgttagcctgtgctatggcacacagaacacagacaccgggttttaagatagtgtggattgtacttcatgcaggctgcactctgggaaagttcaaaggccaaaccatctccttcactccaattcctttctgctaaccatagcttatttctttcagctgcaaggaatccaatgtaatacactacnnnnnnnnnnnnnnnnnnnncccccccccccaagtatcagtccaccctgggacaatcctttcccactgaggcaagacaaggtggcctagttaggggaatgagatccacaagcaggcagcagattcaggaacaacccatgtctccttttcttaaaggatctataaaaataccatgttgatcccagaagccatgaaaatggatgagaaaattaactgcattaaccagaaagaacatggtgtgaaggctaaagatggcacaaaagcagtccacccaggatctcggcttttttttttttttaaagtaattaaggaaatgatctagtttcaaaccatttatatttcctccacctgaggagtctgagcattttccatgcatggtttcaggtgtgtgatttgggccacttgatccataatctttggccctgtgactcctgtagtacaagcattgccatggtcaacactgttgccctgaggaagggtgaagcactctccactctgttggaggtttaggggtctggcaactcatcccccaaaggtcagcttctatagggctacctcacccatccacatgtgtgtttcagaatctcactgggaaatcgaggagaattccttataaaggcagttaaaactgatagtcaccgaagagagtatggctgctggagaggtggggtggggtggctccaccatctgcgagtttgctgataatccagaaatactcaattacaaccagttaacggagtgtgctgccagagttgaactctgacccccccacacacaccctttttttgttttagttgttgatttttcttcccgtgatcaattaatagtttggactcttcttagaaagcctagcatgggaggttcatgaataaaaccataaaccccttcagaagagtcactggtaccagttattgaaacactctatttcttctgtttagcctctgagaggagagctagtaactatggctgtcattgctgtgcgtcactgccctgcgcagaatggtcgcctttatgtagaccctccttccccgagactttccactggcgtggttaagttagtgatctcacctttgctggagtcattatttaatttcctgtacttttaacttgttgatgacaagttttgaaaactgtcattttcaatgtttagtgatataggtgcagacaagtcccattcccttggatttcaccttgacgtgtaattagtgtggtttcattagcataataatggagatggaactggaggaggtagggcctagattctaacaataatggaattaacttttatggcaacaagaatcagaacatgtatgtacagatgtctagatttttcttatgggagtccttccaaaaaaaaaaattgtcaaattctgacagctgctatgacttctttgattccttaattctttgctttttagtggaagggcatcttccattcatgactccagcagtttcgccccctctaaatgagacagaaattcgaatctccctggtggtcgatcttttcacagcttcagtccaattccagtgtgacatcaaattactaattatagctgagcagactgccttttacaaatgacagccttcgcaaactgccagccggccagctccacagcagggagtctggaggagcaaaggaaaatgtaactggactcgctcgctctctgggggatttgacctgactctctaaaaagccagtgttcttgagagagagttccaggcatttatacagagatgcattttgtacatcgctctgcccagttctcccaaatgcagttccgatttcctcaggtaaagtgaagacggtgtgaaggaagtaagagggtcagaagactgcttttaacacgtcacctcttccctggacccactggaaagaaagcagcagccctgcaattggcatttacagagctatattggcaataatcattgttgacactttgataacccgctacaaaaagcctccttgttgattcttatgcatcataaattgcactggtgattaaaaggctgccactggacctgacattttacctattactggctgaaggtttgatagaattgatcatttataccctcccttctaaaactccttttccaaaccccctttcagcatttcttctgagatctttaaatggtcccccattatagttaatccctgtccctgtctggtctttggttatatgcaagataggatgggtgcccagcccctgagcaggcacatagtgtaccctttgggaaacctttctccagtatgccttcccacttaaggtaagctgtacctcaggagacattgtgggggacttccaactctctaggcagctaatcctttaaacttactctgtatcttccctcttctccctagatggaagggaaatggtttccttcttcggtggccacccaaagggcagagcgtggtttcccttcagagcagaagtaggcttcattatttcacaggttgctttctctctgcaatcctcctggcagttaaacttaaggtttacatacacaaagcaagcactcatcattgagtttcttcctctgccccagaccttagaaagaccgcactaggaactttagacccgtgggtcagagacagtttttaaaagggaatttgggaccaaagggagtttggtctgggatctgagtgcagaccagacaggagaatcccagtgggttaattgggtagtctaatgacaggtcagatttaaataagaaaaaaggaagggtgtggggagagaggatttgattggatcgttgggttttatagaaatctgtggttttaaatcaagcctttctgaccccttgcagaatttgtgattaacagtaaaccacatttagagtcctgcacttaacactcaccaaaattacacttgttctatgcaaagcttgtaatgctgatgttgttgatggacacgtgttctgagacattgtatcagcatgtctcagtaagcccttgggagactgaggaaaccctgaggtatcctgggaagtagagatggtttgcttgtgttgcatgtgatgctgaagatggaatccaggagtgagtcccttacatgtgaggcaagtgccctacagatgagctcagtcctgtacttacaagagggttttccagttttcaatttacttgtgatttttccagtctggtaagcctggcatatgaaaaacagaggattcttatgaacattttttagatttacattagcactgaaatcgcccagcctttttgacatgtgtgctgtgtaaaggcaaaggtgccttagggtctcttgcctccactggacagaactcagctgcatcagaagcacacacaagcacacgggaactattgtaaaccagcaactcctgggcagttgcttctagctaaaattagggtagagagaagatgttcaacatgtatgtggcttaaatttaagccagcttgctgcatatgtgcaattcttagaatggtaggcaaagatctttgctgtgttcatgttaaaccagaatcaagaggacttaagaaacctccctggagtcttcagtctttaacatttcttacattaccaccaacaatagatatgaatatagcagaatctttagaccaaattggaacaccttaaacaaatactcttcattttaatttttattattttaattatatgtatatacaggtacatgtctctgtgtgtgctctgtgcacatgaatgtgtctgtagaggttagagctgttgagtccccctagaactggagttgcaagcagtaatgagccagctgagtgggtgccaggatttgaactcaggttctctcaaaaagcagtgcatgctctttaccactgagccaactctctagcctctgaaacaaacgtatttcaatggtcctattttttagatcttagagactgccatatcattgcttatgggggaagaccaaatcattaccttttatatagctacttaatattcactaaaatgtgaacgtattttaagtaatatttttttacatgttagcttaagatacttagagaaagaacccatagccagagtttaacagttctcaatagcaacatgacagttaagcttacccagttttgtgcttttaatttcagcacaatttcacaggtatgttgagatctattttctttccacgttttacatataaacagagattctgaaataaaatgtatgaaatggtcacatccagatatgcactctcattgtttttgttgtggaaattagaagttagtaagatgtactaggccatttcccaagctaggtccttgggttgccattcccttctgtggaggtcattgtacgcagccatgtgggagagctgtgtaggaaagcgcctgtcatcactgccgcttctctgtgaacctcatcctcattggctaatgttatcattgctcttctctgtgaacctcaccctcattggctaatttgccttttcttgtatcaaatttgtggcttagctgtttggagaagtggaactgattttattataaagccctagcatctcttgttacccaaaattgataccatgcatgtgatgttattccatcaaactgcttttatcccacccccagcgcaaggattacctacctccgttcccttacagggacagttgtggggcattttctactctgtgaactgattttctgtgacaagcacagaattctattctttttttcacaagtttattttcatttagctgagcttctgatagcgagtaaatgagggacgtaagcagtccctggcatgaggcagcagtgactacttttaagttgtgtgttgagcttgaaggctcataggaacagccatcaaagacaccccaaggagcaatctttgacactgaggcttagagtggaagagaaatttagtaggttactaaatgagcacatcgaataaaaactcatctcgttctaaaatacaagtcctttaatctcagtgcacagtgatacatataatcctctgcattgaaaccttctggtaccaaagcctgtttgcattatgcactcaagtgtgaccagagcgtttcatcttcctggtaatgtcgggatgcagaacaaaagtgcagccccatgttgtgggctccatgttttagcgttcagaaacatgtatttctcaccttgctattgctgatagtcatttataatacaattggctgttttgtatacgatacagaataaaaataaaacccaatgtcattgacttagatagagttatatttgttactacagacacaaatttaatttttgtagtaattttaacctgtcgtctgaaagctaacttgatttttttaattgaacacaaaatcctgtataatttctgatcttataagccttaaaatggattgtttactaaagtgcacgaatgatagtagttatgcccacacactcgcatgtgtgttagagttaacccttgcttgaaaaaaaaaaactgcttctgttaaatcactttggtaaaaaaacactttttgttatgtttttggctttggttattcagagagtctgtaaaaagtcatagtaatttgatatttttaagtatagaagcgataagtaatatgaatcaaattttgaggccttgctttttcccttgggtttacccacttccgtggggaggcatgggagtgccctcactcctttattcgaggtgtgttcgtctcacgtccaccttcatctgctgaacccgccacacaggctgtggccacttctacaattgagagtggcgttctgaacattttaaagtctcaaacctctggctaaatctcccccgaaaggaccctttaactccgttgttgagccatagagaataaggattaattagaaacttgaccctgagctggccagggtccaggtccccgcccctcttcatttgtctctcatatgtgccgtcctgaccttgatcaatactgttggacagtctgttctcgtagtctgtttcttcttcgctgtaggagaataccgacatgctgagagggcttagtgctgagcgtgaactgaatgaagcccaaagctctttaagtttcatagctcatagcaactttagtgtcccagtgagttcactacctcttaagaatcaatttatagctccctgtaccttggttatatgttttggggacttttgctctaggtcagaaaaaatcataaccactaaaccacccactcaccatgaaaacccaaaccaaagaaaagtaacagggaaaaaaattcagcaaattcctgtccttggctgtgcatataaaagtgttacgttttattccatagattcaacttatattccataagtttaaacaattccttccagaagttagagccaatttttagtatacggccatattctagtcttatttgagttttcaggttttaccatggtatattggtgagggatttctactggggtaagctctgctaaagatctcaggtttcctagacaggcagagttgaggttgacaaagcagtttatagatgtggaatcactgaggcaggcattgagagagcagccagggagaaagcaaactcaccggttctgataggcgagcctgagtgctgccttccagtccacacactaaccccactgcacagctatgattattttcccactactcagctgaagaagcagttgggcaaaccaaacagctggttcaagtcacagcccgttaggtaaatcttaatgtgacaccttttagaaaaactttgctcaggatttctcagtgacagctttgcctaaagaaaccatacttaaaaacatgacaagcgtctggaggtggttacacgtggcaaacaaacactgctctcaccctttgacacatacgacttgtggaattcacacaacagccctctacttagtaatcctacttagagacaagaaaccaagtcacagaaagagccacatgctcagagacacgcagctaataattagacgagcctagataagccgtagcagccagcctgggtccaattccatctagaaccacgcgttttaatctgtatctcctggttggaggtgcagagtcagcccagggtcggcaggcagtgagaggactggtcccacactgatctgtccagatgctggatacagagacaggagcgctagatggtggggaaaggtttcctctgcttctacctttaggtgtgcttatgtgtttgtacatctcacagtagtagagatgccttatcttgaatccagcccttgccttgcctgtactgactagatccggatttgggtgtgttctaagcaccattctagggaaagcgtctgggagaggggcttctgccaaccgtattagactcctcacccacagctgccctcctaaggacttgcctctttgcctcttgatccttccaataagcccttataagttgcttaaccaatctggctgcccagttttgagcttggtccaacctaaacacatccccagtgcctgtgaggttcacaagcaagcttagtgatgcaggaaagggtatccagagttttatgagagggaggattagactttgccctgtcacatgaggggattctgttggggtgagcgcgaaatggcgttcatcttcattaatgtgatgtgtgttgcacacacacacacacccagtgtatgcttgactgctttatgtgtggtgtatcatctcagtcctcacagtaatttcttacatatagaaatgagttatagaatcaaagtggagatgtaacccccacaaccccaaagcaaaacgacacaaaagcattcagctctcatttctggctttgtggggaggtctgcctgcttcttggggccccagtctttcagggtatctcctcttgctactctcagaatgtagcttgctaaaactccagggcttgttcacttcaaaacttggtttgggaatttgtgcactcacgcgcgcgcgcgcgcacacacacacacacacacacacacacacacacacacactttgcagttctaagtccaatacaggtgatgttactattatcaacatattctgaaggaagttgttcatggtttctatttttaacacttactacattatttttaatatgcattttactctctgaagctctgtcctgagaggcccaatcccatgctctttgggtgtgttctacttctgagagcctctctgtcccataacccttatgcttaaggatgtattaaaatatctttattaatacttcccttctaaaaagtgggccctgactcagcataaacggatatgaaaacacatctccctctaatgtatcacaaggatgtctcccacatgcactggatcctgcttcccaaacaagaataccaactcctttacatagggagtttactgcttgtcgtagcatctgtgtgtgtgacagcaattcgggaactgcccattgaatagaacctttgaatttctgacacttgccaaactttctttataaagagaactatgttggtgacaatttcattcacaaaatggccaaaatgttctcaaagtgaagcaaaatagcgaagctaataatttggaaatgcataatacacataaatatatgagtgtatatcatcgatgtatgtttgcatacacatatactctttttaaagtgagagagagatgcataccattcagacatttgaagggaaactcagtagataaattcagtgtattttctttagctggaaacagtgtgaggagccaggaaaggcggtatgttttttccatggactttttttccttagcagaaaaaggaccactaggggctcagcataaggccaaagacaggtagtgtattacattggattccttgcagctgaaagaaataagctatggttagcagaaaggaattggagtgaaggagatggtttggcctttgaactttcccagagtgcagcctgcatgaagtacaatccacactatcttaaaacccggtgtctgtgttctgtgtgccatagcacaggctaacgcctctcctctgctgtaacccacacttggagtttctccaaccctcttgcgttggcgaaccaaagagcaattactcagctgctcattctcgtggtaacttgtgaagggtagaatttcccatcttaatccactatatgttacagtattatttgtttggacttacccaacagcaacaaggctttgaggaacaactgccaaatctctggtcagatgttctccccatcagcacacagctgatggatggatgggactttgtgagacaagatgctacaagtaaccaaagttcagtttaggccacccaggaaggtcagagggtaggtcgtattggattacacagtagagtgttctcatagagtactccaggaatacatgttcagtactcagaaaatttcttgtaagaaagtgaaccaaagaactccatcgttttcatttctgaagtgtcacatggggagcatgcctcaccccgattcctagtgggactgcttccagtggtcccagctcactggctcaccctggccgcattaagctaccttgtgcttcattgtccctgcctaggtgggcaaaaccaacatcagtgtcctttcgggttggagagagcatgtagctttttaggctttattcaagctccttctccttctcgtttgttctaggccaaagagctgccaactttaaaggataatgacttcatcaatgagggccaaaagatctatattgatgacaacaacaaaaagatattcctagaaaaactgaaaaaggatgtcgaggtaagtaaacccgactgggaggatctgccatgttccgccttgtgctcactctctcttcgtcaactgggaggatccgccatgttccgccgtgtgcgcactctctcaccgtcaactccgctaggttcaaggggctttgagccaccttttcaaatctataatgaagattagaaagtctatctcctacgttacccatggcccacatataaacagagagacctcatgttacaggaccgggttttaagatgcggtgtgcccagtcaggatgacaagaaccagcgagccctgctggcttctgtagcatgtccccattctcaggtgccatgcctttgggtgtgaagagggcccacccacagcagccagcatgaaaaggcaggaatgctgggtttgcttcaacaccagatcatgggaaacagaaacatgagtgacagaacgggacgtccttccccgactcccacccctgtgtaggtgtacacagcctcaccttggttcactgttaccacccgcgctcacaccgggaggcagagagccagccgtgccgagtcaaggggccagcctaggagcagtttgggttcacggccctcggtgagggtggcagacaggacccagtgttctagtgaacacatagcctgttttgaaagaggttcattttaatacgcttttctttaagaataaattttaaaaaaaaaaaggaaagaaagaaaaaacaaaataaaaacctcttcatatcattttgtttagctctcctgttgggctttcttacttcagtcttctagaagtaaactcggggtgggggtggggggcagttattttcttgtaatttgtcaagttacaaaacagtacaatgagaattttaacttaggcgattactcactaggtttctcttggtcgttacttttatgtgcctttgtttttcctttgaaatactgttccctgtgtactaaattctgcctcttggagaaaggctttaaggaaagattttctttctcatgtcgttaaaccaaaacaattagaatgactggaggcaaaggatgggaccccagtttgattccccctgaatgcaggagcagtggcagcatctgggtcttagcctctgacggctcttttggttagaggacacacaggctcaccccgtttattcgtaattaattatctttaggtcttttaatttttttttttaatttcatgtatgtctctgtgagggtgtcagagcctctagaactagagttgacacaggtgtgagccgccatgtgagtgctgggaactgaacccaggacctctggaagagcagtcagtgctcttatctgctgagccatctctccagccctatctttaggtctttaatttttttccatcattttagcctccatggtgtgtgtgtgtgtgtgtgtgtgtgtgtgtgtgtgtgtgtgtgtatttacaaaggatacgagtgagtggtttggttttggtttttgtttgtttaactaaggtgtttgtttttctcatataacatctttctctcatcttttattaataagcagttcattttgcttggctgccagtgcttattataaaaatgcatatttgttaatgttagttaagtatcttctctttccttgagaatcagcttgatccacctggtactttagaattgtagtgtagaggaagcgccctcttttggattttcacttactaaacaagaaatttttgatcttgagaataatattgttttagcaattatagtaaatagcccttagagtgatctgtgacatgcccccccacccaaaaaaaatcctcttttttgccttctttctgttggccgcccatcactgagatagtaagcatctaggaagaatgtaactgagcagctcagaattggagttgagtactgtgaggatgctcagccagcgctcatgttgtctctaatgattgattgacgacttaaatagttaatcctgtatgcggttctctcacatgcatagctgctgtgtggacgtggcggcagagcaggaagtgtttgttctttggagtgcctctcagtggctgataacagtgtctttgtctttgaaacccgtgcagaagcatcattaaattgttaagcaggtaattacggtgaagcagcttgacatctgatcttgataatgaggctagcatttaatctagtttttctccttgagttccatgctttctgattttgatgactagtctgaccgctaaaatttcagtgtgtgtccatgcctgcatgcatgtgtgcttgtgtgctcatgtgtgcgtgcgcacctgtgtgtgtgtgctattctcattttctattttctctctatgaactctttctgagtttaagacagacagtggtgcattcttttaactgcagtatccagaacgtagaggcagggggattactataagttcaaggccagtctggtctgcgtggtgagttctaggtcagctaagtctcaaacgggggaaaaaacgaagaaaagaagatctgagtttgttatgactcagtaaatggtgtgtatttttctttgaaatgagaaatgattgtcatttgaaaaatctgttctaattggtttttttctccctgcaataggaatttttgtctatatgccagtcggactcctgtagttctgatagcgttcatctatacattcagtacatttatgtaatcccttttctgcaaaaaagaaaaaaagaatcttagaatgaaactcccttccgttttcttctctcttcttgtcaattctaacagtaaggaaagccacagtgcactgagggcgtgcacatacaccatacagttctaatctgtgcagtcctcagagtgtccccactgagcccctcagctccatgtgctgtggacccacaactgtggctgtgaataaaggcttcaggatgcaggaagcagggtggctagcatctatggagcacatcgtccttcccataaagtcactgtcttttttcagtcttaaaacatcttcttctgtaggatactgttaccatccctctctgcccatgggaaggttgaatccagggatgctgacagacagcgagtcagaccatgagttaactactcagagtccacactcccaaacgcactgacgtggaatgtgaactgacaatcttgagcacacagccagaattttgtgttccacaaaacctctcaaggaggatgattacagttttcattttaatataaatttttttgagaatcttatgaggtttacagtttttaacagtgtggtcaaatgttgactagtcagattggagtgttgagaagtgggatttggggaggtaaggaggttcttttcaacctgctgacaggagtctataacctgctccttgaccacatgatctggaagaagagttggctccaggactcatccaaatcatgaggaaggtccttgctcaggatgtaacccaggctaagggtgtggccttgtgatgggctgtgtacttacacaacacgtacatagctgtggacttagtacccataaaaaaaagaaaaagaaaaaaaacataaactacaggaatttagaataatgaggaacttcttctaaaggagtcagataggttggatcttgtgagaggaataaagaaataaaccagaggcccagcagtgtaagacttgtacaaagacaggcaggggtctaggaagttctgaatctatacatttggacatattacatattttcaagataaatatatgagataacccaggcatggttgtatatgtctttaatccctatactcaagaggcagaggcaggtagatagctatgattttgagaccagcctggtctgcactactgagctctagcccaaccaaggctatgtagtgagaccccacaaataaacaaggaaataaacaagtttaaagagatcagtggtgggggtagtaggtgggtagatatgtcttgctttttctacattcactggcaccaaccccaaaactgagccttggtccctagactgtcttttctttctacttgtgggctctcctttcccccacagcgtttaggtcttacttgaatgtttagaatgagcacagctcatttcactgtgacaccaaagtgatttgcaataaagttagcgggagaccagtctctcccacatgcttttcctctagactcacactggtccctactgtacacaggcgtgcctgtagtgtgtggaagtgcccttcctccaggctgcctggtgctccccatcacagcaccaggatggtggcaagttctcagggagttataggttttcaccttttgcaggtgggattctgcgaagccagccagtcagtcagtaggttgctcagtctgctctcagctaagccatccatgcttcagtgaatcaataagagcgttgcacaccatgtatccgtgtagatctaattaattaagaaaaagaacgtgagaagaaagcaacatgcaaagtcaaagaacttgacaggtgggagggaacacagatgggtcttgcctggctggattccatagccatgacaggaaagggaaaggggacaatacccccgagacctcatgggaaatgtagtaccttagcttcatcctcagccagaagtgggtacagtcaatgggctgctcagaatgggtacagagggaatgtgctccttaccagagcactgtcaccactcactcactcagtggctatgatagagctatgtgggcttttgctgttggtggctggcagcatggtatgtatgtgctaggagtatgctggagtcccaagcatcctggtgactccctggttttgcccattaaccagtttcattgttgggataaaaccacacacacacacacacacacacacacacactctctctctctctctctctctctctctctctcctggggctcttctgtgacagcagcttatactcttaggagtacctcaacagctgcataagaaataccagtctcagaggccagctttgcatttgctgggtggggtggaatgatcttagcactgagccagccagaaacaaggaaactgccaagaatgggaaccacgtaaaggatgctcagggtccccgttagcccttggagccttccccagtgtgtgtccttctgatcctgagttcttcggttcttagcattgttaaggtgtaactatcctgtctcctcctcctccagttccttgcacagttaaaactcatggactacagcctcctggtggggattcacgatgtggagcgagcagagcaggaggaggtggagtgtgaggagaacgatggggaagaagaaggagagagtgacagcacccacccgatcgggacgccaccagacagtcccggaaatacactcaacagctcaccacccttggctcctggagagtttgatccaaacattgatgtttatgcaattaaatgccatgagagtaagcttagtgctattgactcttttgcatgtagagtggtttgatttttgcactgtgatctatcagtaattctggccctagttccaagggtgctgctatgttgggggcctctgctcagtcaaatgcattgatagcagacagtgatgtgtgtttaaaggaaacagtaattccagatgttagagggaggaagaaaactagaaagcattgttaatgtaatacacatacgcatttatagataatgtatattatgacagatatgtccagtgtattctggcaggtgtgtccagcttgtacctcaggatagcagtggatgaagcatccaacatgtttgcagatcacagagttatacctcagtgtgaaaaggttaaataccccaaacattatttttcatgccaagctcagtggtacaaagcctgcctgagcagtttaacaagagtctgtctcaagatgaaaggtgttctgtggctgtagctcactggtggaacatttgtctggcatgggtggggtctggggtttgagcaccagaacagaggctggacaaagcagcttggctcttctaaataaatccattgtgtcatagatctgttttggataaggcaagtgtgtgcagcccactgtgccctcaggtgactttcttgtggtgccaacatatcaggggtgcagaggccaggacctgtgcacacagtgagagtcactgcctcttctgctgtaggcgtgatgagatctgtgaccctcctccacagggccacactcaagtcagtcctcctggggtttgcttggtttctagatacatgtccatgacaaaaatattttactgatatggtaaaagagaaaaacaaaatccatccttcttacttaaataataaaagaggcaatttctgcccctcctcccacatatcagccaatgggtttgggttgtatttttcttttatttttaatattttattttataataattcttttattctaatatttttaattttacccaccaaaatcattccttaaacataagaaaactaggtataattgaatgtacatttcttactattcataattgaaacagtgtatcttttgaaactatgtagaaagtagataatggagacctagaatcctttattcagttctgatactctatccagagagaaaatgcagtgtctgagagtagaaaggggttaattaataggcataattaattctacttgttttacagaaaattctaaaaatagcatttttctttacataaaacaatttactatcgtgaacgcaatgcagattaggattaagccctgatcacacctccttgcactgctctgatttcctgacgcttctctttcagtacagggagcccaccggaatgcgggttctgcatccttggttcctggctccctcctagtagtttgtatttttcggagtgttgtcacatgtcccacagtctctgttctcctccctttccagatgcgcctagaaaagaggtatacttcatggcgattattgacatccttactcattacgatgcaaaaaagaaagctgcccacgctgcaaaaactgttaaacatggcgtaagtactgctcctgcaccccgcccacacacagcatggcgcacctcgccacaccccacaactccctggcattgcctgtggacacttcttggcctttctggctcgctgttgtaagttctctggtgattgttcctgggagtgaggtgttaacccagccctgcagcaccagagtccatcgctgtatctgtaggttcttccatgtttgaaaaacaccccaaagatgaacatctgacaatagttctgttttcatatgaaatgttgcaccctgaagccaggtgctccaaaaggtgcagggttgtatcttttttctcacaatattttcttctcctgttacagagctcttgagtataagataagctttgatacctacctcctcacttagcttgtttgctctaaatcttcactgatccagggatattgttgaatccccatgaaaagcctgtgagggaaattccattgtgcttcccctctccccttgcttagaaagtactccagtgtacttttacacagaaccttttttctacatagggctgcataaggccatgtgtgtgagagcatgtagcgtaatgtggaaatattcccctacacactcctctcccccagtgtgttttttcctccagtgggaaaaactgaggctgacagcccccagtaacatccagaagtttggcatagtaatacatacctgtaatcctagcaccttcatggctgaggcaggaggattgaaggtgtaagaatacctagggctacacagggagacgatgttttattccaagaaaatggggcacattggagggttttgagtagaaaagtaataactcaaatgtggtacgttggggttggggtgtgtaggtgtcttaagatttctttctttccatgtaatgtgtatgggtgttttgcctgcatgtatatctgtatatatcgtgtacatgcgtggtacccacagacaccaagaagagagtcttagatcccagggatccgtagttatagacagttatgagctgccacgtgggtgctggaggagcagtcagtgctcgtaagtgctgtgccggaagactgtgttagtagtctatggtgtgccaaaagactgggcctcattttcactcacagattcctagaagtttagatttatttgtccaaagggcagagatcatttgagtagtggtttaagaagagaggccgcttagctgtgttcttagctttagggttgggggtgtggctttcgttggtgaggtgcttgccaaacatgttcaaggccttagattcagtcccctgctaccagctccccacaataaatggctgtcttaatgttcagccgcttttggaaatagctgtagaaactgaacggtaacttggggcgatcatgagcattctttatccttcacgatcaatatccttttccttcaccaccccctaggctggagctgagatctcgactgtgaacccagagcagtattccaagcgctttttggactttattgggcacatcttgtaaccttctgcacagccccggatgggcatgaactcgggaaggctggtggtggcttcagggtaggaagaaaaggaaaaccgaaccccaggaagcgctcaccttgcaggaagcaagccttgtttacatcttcaagctgacatgactgaagttgggggctactcgctttaacagctacctgatatttcccagcatcgctatttctgactctgtacgtgtgcacacacgtgcgtgcacacactctcgcgcacatttttttaaataattaattaattaattaattaaaactgatcagcttgaatcagagcttgtaacagccagacccctctgattccagctgtggccccacggatagatgaagagatgagcccgtgggggaagggaacggaaatgcacctcaatgcagcaccacaagagaaactgtagatcagtttgttttctgacttgaaagatatgagattgttcatcagggtggtggtggtggtggtgatgatgatgatcatgctcataatgatggtgattaaaagaaagaaaattttatatcaaatgttacacttctggcccacagaaagactactctgaatagtggttacctaagcccacagccctggtaaagggatacaagcatctccctgtgtactggttcagggttccctcctaacactgtcaacatccccagatgtcccaggctaagcccttcatcttccaagagtctgatgccaagaacctgtcaacaatttcacctccaggaaaaccacttgcatttctcttctcgcctggagcccatcactgttaccatccttaagttgcactgcagaaagtcactctgcaaaacagatgtaaaacgtccctgaaaggtgcatagtttggggcaaatgcggctacatctcccaatgcaggaagatgagcagggagttcaaaccctccagtggccgaaggcaaacccagttatggtttatgtttagccattgtttaggaatggaattttgttatgaattatccctttaactgaaaccctcagttttactgtttacatggttagagaaacagggatatttttgaatctaaaaatttaatatacagcatgtgatttttgaagtttacatgtaaagccattttgcagtgtagggaacataatgtttgttgtgttttgagatatgtcttgcagttgtgtttctgagtgagtgttttgttgagagtacttagtagacagtctatcacataaaagcaaaaggattttgttcctcaagatgtgtatttatcaatctagtggggttttttttctataaaaaaattaaactcaaaatctggttatgtaagttcattgccctaaactgtgctgatcgtgtgtaactgagattaaaaaacaaaacaaaacaaaaaccttccagcatcaattatgtatcttccaacttccctgcattcctaaaaggcctcaagttacagagtcctagatttgcttagagtccattaccaacttacacgctgtttggcagctgtgcctttaaaagcccctgtctcaaatgtgagatggtttctgtaggcagttttagaaaggaaaaaatccacccttcaataattacaagtcaacaagtcccctgccaggctgccttcccagtcactttccttttggcctctccaggtccagctgtgcccaacatgtgtgggctgccttctcagcatctggaagccagcatcagcaccatctgactcctgtgtactgacctgccacagatgcattagcggatgatgctaactcactgtaacatagttgtacacatctgtacctgatgcatttaaaataaccagttgactccgtttccgggcactgttaactgtggtgtccgatccgtttgagtgttctgaagctctgctcttaacctttgatccccaaacttacaaacccgagaccctaaagttaaaaaaatgaaggtacatatacatgatctgagtaaccatttcctctgtggccaatctgtatgcttttagaagtttacaaaactgctttggtttttgtctgtaaccatctctgtcatcccaataagctgtttggacaagagcgagaacagtgctaacagtgtgcgctcgagtcatgatccgggctttacgaataaagcactttgatgactctcttagtttggcttctctgtgctggagacgaactgtgatgggactggggtgtccccagtcattctgtggaaaggtaaaggaatgtggcagcttttacctctccagggcctgaccttcaatctacagcgatggatgagacacataaacaacacatggacttcttacccagcaatcccagggctggggatagctcaccagggaaagcacttggcgcacaagcattaagttccaagttaagatctctaccgcccacataaatgccaggtgggcatagcagctaaccagtaagtccagcacgccaaaggtgggagagacggcatctgacaagctagactcgccatgttggcaagctgtgggttcagtaagccaaatgaggtagatgttgaggaagactcttgatatcagacctcaggttttctcacacacacacacacacacacacacacacacacagagagagagagagagagagagagagagagagagagagagagagagagagtcaaaactcaaggttctcagtgcccctccataggtagcactgagcttttgaggaagtaaattgttacagtcttcatgtattcatgtttttaaccacttagcatgtttgaaactcatcctctgtttacatgcaacacttcttctttctttgtcctagatgtctgactagtgaggtttgggcctttgaacttctagttccaattttcccagaagttctggggtcgctatggtttccactcttgcccgtagtaattttgacatgcatttttctaagaacataagtgctgagttcatgctggtcagccaggagcttagttcaggtttgtttgtttgtttgtttgtttgatctgaaggtgtggccatgcctggctttttacataagcaatagaggtttaaactcaggccctcagctggtacagcagacgcatccgtctcacccacacgtgcacgtcattttcttaaggcaccgtttactcagccctagttacataatgtggagattgttttgtttgaatcataaaatatttttcccacagggcagatgctctgctgtgcctttggagttcctatactcaagtcatctgctcctgttatttgcatcttgaatttgccactgagacctgtgtgttgagtactcggtccccagtccgtggcgctcctgaaaggaggtagaaactgtggagggtgggagtttatgtgagaaacccaaatgaaagcttcactgaaatcgcatctcaccccagtcagaatggctatcctgaagaacggaagcctttctcctgtctgcaagcacaacagagtgggattaatagtaagtgctgcttgcccatgggacttggctggccattgcctcagcctctgctctctcccgcatgcctgcattacttgtaaactggataaattttgggttgaaagttttgtgggagggttggtgtttctcttgctctactggggctcctgtctggatacaggaggtggcctcttcaggtgccatcgaagacaggagcaagtcatcctctgagaggctccacccagcagctgacccagatacagacaccacagccaaacagtgaatggagcttggggaatcttacagaagagtagaaggaagactaacagaatcaactaacctggatccttggggctctcagagtctgaaccaccacccgaagagcatatacaggctggacctaggcttcccagatcatatgtagcagatatgcagcttggtcttcatgtgggtcctgaacaactggagtaagggctagcccaaaagctattgcctgtctgtgggataggttcttctagctgacctgccttgtctggcctcagtggcagaagaagtgcctagccctgcagagccttgaagtgcagcaggggtggggcccagtgaggccccccaccccacctagaggaaataagggagggaaggattgtgggagttagtgactaccgggatgagggcagtgaacaggatgtaaagtaattaaaaaaaaagacaacaaatatcagtaaaggtggaaatggaccctgatatgatgctaatgcagcagctacagaaatcagtatgaaggttcccaaaaaaactggagtggcctagcttcccactccagggtatatacccaaaggatgctgggtcaggatacctgaacttcctcttttgttgttgttgctgctgctgttgctgttgtggtccctgttgtactgtatgtacagtgtgtgtgtgtgtgtgtgtgtgtgtgtgtgtgtgtgcgtgctcacgcatgtgtatatatatgcatatatgtgtaagtacccgtgcatgtgtgtagacactcagagttgaccttttttcatcaagcttttctttatggattgaggatctctcgctgagcctggagctcaccaattctggctagcctccccagccagctagccttagggatctctggtttctgcctcctgagtgctgggcttacagcagctgccacccctgtccaactttacatggtttctagggatgcatactccaaccttcatactttcacagacactctatccccgaaccatctcccagccccacccacgctcactgcgcagctgctgttcataatagccaagataaccacaacagcctgaggtccagcaattagctaatggtttttaaaaaatatgctgtctgtacacaatgggagttctatttcacaataataaaatgaaactgtcatttacagggaatgcaagggatttgtagactacattaagtgagtcaagtcagtctcagacaatacaacttctcattcgcagagtcagcctttgaaagaatattattctagaagagggatgagaaaggagaccactgggaaggaagggaatgatgcgatgattggagggtgaatatgaccaaaatatgtgttattcttgaaaacgtcataatgattctggttattttgtacagcgaatatgtgctagtcgaaaagagagggtaggggttggcaagctggctcagtgggtgaagctcttgctgccaagcctgttgacctgggttcgatccctggaaaccacatgtgggataagaaaactgacttttgcaggttgttgcacctggatgcccttgagatgggtgtgtgcctcagcctgctggtctccgtgcttcccagccatcagaaggtaaacaggctttctaccaatgacacatagacccaaggaatcagggcccagtagccatgaaaccaggagctgaaatgtatcttgtctcattttaaggtgacagcctctggtgtttgtcccagaaatgggagcctggcccactcctccacagctcttggctcagccgctcgccagcctgccttggcggtagtcaggtgggcacagagcgagtgcaccagggagagaggaggcgctcaacctagttcctttctgaaagaaaaccccgttggatacagtgggtacctttctatcagactgaatgtcccccagaaatgtgttctgtttgttcatcacatgggaactgccaaggagcagttacatgccaccatctgtaattttctattttaaacactgttcagcctaacttcataaatgaggaaacagaagatgataatttcatagtccgggctgcagtaaatctgtcttataaaatcccaacacttgttggtgtgacaagtgaagaacaataaggtgcagcgtgactttagttagctatgggaggcttacacctgggctctgtgggaagatcaaggaagagtgagaagaatttttgaaagttgaactaatgcagatggtacttgtttttggataattattcttggatagtgatccaatggcaccactggtccccagttggcttggtcgttactaggccgatgttcctatgaatgaactgtgtgtgtacggttgtggtgggttgctagtgttgtggttagtgattctcgcaggggtatattatgaaagccccttctttatgctctccttgctccagttagctagggtccaccaggagtttctctgttttcatactgccttgtttcacaaaaccttagactggagaatctgagtgagttatttaaggtcactatggtggcatagccaaggttaaaactcagcgctgttcccattcagactggatgtctgtctcatgtatggtggtagacttgggcctctcatagcctgggatcccaccctcactctaaggagagtacatctacagcaccacaggtttccctaccgtttccctttagtccaacagtcagtaatttaatttttgcttttctaaatcagggagtctcattttgagtttatttttctgctgctgtgataaaatactctacaaagcaactaagggggcgaaggctctttcttctctggctcatggtttgaggctccagtccgtcatggtgacgggagcctgactcatgcacaatcgggaagcagagagtggtgaatgtgcacggcgaatctcctccctttctccatttatacaacccaagcgggacacacagagtaggcaggtctccctgcctcgatgaacgcaatcgagataatattcccctggcatacccaaaggcccatccccagatgattctggatcctatcaaactgacaacactaactgaccatctttctgaagcatataaaaatattcctaagcctaccgaatgtcaggctctagaggcagaacttagatatggcataagtggttggttgggcttggaaaccactgacttacctaccccattctcactgaccgctctctctctctctctgtgtgtgtgtgtgtgtgtgtgtgtgtgtgtgtgtgtgtgtgtgtgtgttttcatgtgtatgtgtgggttcacatgcatatgtggaagccagaggacaacactggctatcattccacaggagcaagagttaatcactttaatgtttgaggcagagtgtgttaatgggatctcagactcacttcttaggctacattatctaggccaacaaactctaagagctgtttccacttacccagtgctggggctacaagcaaacccaccactcctagcaaaaactttgccaacatctaccctagcccactcatcacacatttcaaacactttttctaatgtgcatctttctcttccccttttttctagaccttctcttaatcgatgaacaaaacagctttttttgtcgattataacagaagccagaaaagccctggcagagggctattccaacccactgtttttgttttttttttttaaatcattaataaagttttatcaaaacatagtcctgtccattcatacagtattttctatggcttctctcagactgcaacaacaaagttcacgactgaggcagagacatcgcagccacagtgcctaaagcattccccatgtgcccttgacaggagaaatttgttcagctgcaaagcagaactcatttaagtattccagtgtcatcccttcaaaaccagggacacagatggccactccttcatttacttcttatctgtggtatgacagaaaacagagtttgaaaaaagcatcaaagtctgccagcaaggttccacattaatagttgttgtgtttagttgttgtgaataaggagtatgtattaccactctggcattcatgtgcatagtgattaactctggtttgtggctattctgacacccactggctttctcattgcagtgataaaggagaattattcttttttttaaaaaaagacaagagaaaatgaaactaactcctaatgtttggcaagccttcatgtgagccaccgtctctctcctgtaactccctgtcattccttttcctatgacttttcctaactcatacacccactgtagttagatttcctgtcttcagcacattcacgatataagactccgtatctttactacatatgtgtatgtcacatcccagtctccctctgtcatcgcacctggccccagaaacctgcatggaccatggagaactcagactttctgtccagagatacagtccctcatgcttgcactaaagctggcccaactgcacgcttcttactgaagggaaagggaaagtgactttgggtttcctatgctgaaagccacttagaaaggatcttaaatataaactattcagcccatttgttaacacactacaaaaacagatggttacactttttaacatatatgacatcttatattcttatgaaataatttatatatacatatatgtgtgcatatagagagggaaaaactaatgcatatagatagaaaaaactaatatatattgactaatctacatgtcacacacacacacacacacacacacacacacacacgtcagttttttcaagatgcccaggcttgttcacctgttagaaaaatgctgtgctcttctatcatccagtctctcttatactttattattattattattattattattattattattattattattcctcaggaagttctggttaaggctttcatagcaactcatgtgtccacttttctccctagttctgctgtaatggtgggtaggatgcatttggtgagcacgccccttcctactgcactggcagtcagtcaagtaacctgtgagtccagtacactacacagcgtcagaaacaccacgttccaggcagcaactgcttcctgatttgccacacttctgcattttgaacgtgatggctgatccagcaggaaagtgggttttctgcttagcttctgagtacgggccctcctaatcccagctcccttttccaattgatgaagatgagttcctgagaatcagcaggtctatgtttctataaatagccacatcgagtaaacagaacatatggccaccgtgaatacagacagtcttcagggctggcaacgttgacaaccttcctgttgtcaagctctcggttcagccaaattcaggatagtcagtgaaccatacctttgttcttttggcggttcctcacttggacttaaatctgggaattaggacaaatctagtcagcttccacaatcccaaatgccgattccatgcgacaagcaaaaggatagatacctctaggatccttctgcacacgtttattgggagagcttgattgcagaggcgaagagaccccgagcccagaactggtgctgcttatataggcctaggagaggcgtgtctcacacccagattggttatgcactacgcctcatttgcatgttcctcatctgattggctactctctctctctgtacctcacagagcctcattatcatacctcatttgcatgcctcacatctgattagttatactctcaaagcctcattatcatgcccgggccaggcagtgtctttgcaaaaaactttactgcatatgtacacattggttgtttgtccaaacttatgcgtggtggccagcagtagtcagtgccactctgcaacggcacatgtggcttcccacagatatccctactgtgtttcctcgagaagtgctccaggtgcttggcgggctgttccatagcaagagcaggaagcacagttggatggtgaagtaaagaccagtgagctcgtcccaggatccctgtgtgtactgtggctgctgctaccagtgtgctctctctatcaacaccaatggaaaacagcctttgccattagggacacagagcagcactacccttggacttggttgagtaaagaggacatctacctcaaagacgtgggagaggtcatggagaacccatgacagtatgtggtctctgaccgattcttgggaaatgagaagtaaaaatgcagttggggctcaggtgcatggctcactggggtaaaatgcttgctgttcaagcctggtggccaggtttgaaccctagaatccacatagaaagtcagctatagtggtgtgcatctgtaatcccagcactcctgtctgaaagctcatgggccagctaacttacagtacacagcacatggatagaaacaataagagagaccttgccccaaaacaaggtcagaagatgagaagcaactcccacttgtctgacttccatattataaatgattttgatgacttaaaaaaatgtcaatactgagttgtatattttaaaataaattttattagtttaataaataaataaagtaagtaagcatgtacccaacagtcaacataattaattaattagttaattactt

SEQ ID NO: 496 - DNA, 1478 bp, Mus musculus
ccgagactgcgaccatggcgacccctggcaacctggggtcctccgtcctggcgagcaagaccaagacgaagaagaagcacttcgtggctcagaaagtgaagctgttccgggccagcgacccgctgctcagcgtgctcatgtggggggtcaaccattcgatcaatgaactgagccacgttcaaatccctgtcatgttgatgcctgatgacttcaaagcctactcaaagataaaggttgacaaccacctttttaacaaggaaaacatgccgagccatttcaagtttaaggaatactgcccaatggtcttccggaatctgcgggagaggtttggaatcgacgaccaagatttccagaattccttgaccagaagtgcaccccttcccaatgactcccaggctcgcagcggggctcggtttcacacgtcttatgataaaagatacgtcatcaagaccattaccagtgaggacgtggcagagatgcacaacatcctgaagaagtaccaccagtatatagtggaatgtcatggggtcacacttcttcctcagttcttgggaatgtaccggcttaatgtcgatggagtggaaatatatgtgattgttacaaggaatgtgttcagccaccggctatctgtatataggaaatacgacttaaagggctcgacagtggctagagaagctagtgataaagaaaaggccaaagagctgccaactttaaaggataatgacttcatcaatgagggccaaaagatctatattgatgacaacaacaaaaagatattcctagaaaaactgaaaaaggatgtcgagttccttgcacagttaaaactcatggactacagcctcctggtggggattcacgatgtggagcgagcagagcaggaggaggtggagtgtgaggagaacgatggggaagaagaaggagagagtgacagcacccacccgatcgggacgccaccagacagtcccggaaatacactcaacagctcaccacccttggctcctggagagtttgatccaaacattgatgtttatgcaattaaatgccatgagaatgcgcctagaaaagaggtatacttcatggcgattattgacatccttactcattacgatgcaaaaaagaaagctgcccacgctgcaaaaactgttaaacatggcgctggagctgagatctcgactgtgaacccagagcagtattccaagcgctttttggactttattgggcacatcttgtaaccttctgcacagccccggatgggcatgaactcgggaaggctggtggtggcttcagggtaggaagaaaaggaaaaccgaaccccaggaagcgctcaccttgcaggaagcaagccttgtttacatcttcaagctgacatgactgaagttgggggctactcgctttaacagctacctgatatttcccagcatcgctatttctgactctgtacgtgtgcacacacgtgcgtgcacacactctcgcgcaca

SEQ ID NO: 497 - protein, 409 aa, Mus musculus
ETATMATPGNLGSSVLASKTKTKKKHFVAQKVKLFRASDPLLSVLMWGVNHSINELSHVQIPVMLMPDDFKAYSKIKVDNHLFNKENMPSHFKFKEYCPMVFRNLRERFGIDDQDFQNSLTRSAPLPNDSQARSGARFHTSYDKRYVIKTITSEDVAEMHNILKKYHQYIVECHGVTLLPQFLGMYRLNVDGVEIYVIVTRNVFSHRLSVYRKYDLKGSTVAREASDKEKAKELPTLKDNDFINEGQKIYIDDNNKKIFLEKLKKDVEFLAQLKLMDYSLLVGIHDVERAEQEEVECEENDGEEEGESDSTHPIGTPPDSPGNTLNSSPPLAPGEFDPNIDVYAIKCHENAPRKEVYFMAIIDILTHYDAKKKAAHAAKTVKHGAGAEISTVNPEQYSKRFLDFIGHIL

SEQ ID NO: 498 - DNA, 197526 bp, Homo sapiens
  misc_feature (1)...(197526): n = A,T,C or G
atgctcagaatcttctaggacctcaacacatatgtgacgaatgaatgagcaaaaatggtaataaacgtacctctgatttcaagttagtccctgagttctagtttatcaagtttttaaataccagtaatatgacctacttaaaatttgaatttgaaaactaaaatggaaaaagcctgagttagtaaaggaaaaacaggactcttcattgaaagttagttgtgacatcaactctctaaggaggagccatcccatagttaaggtgaaagcacaaaccaggggcatgaatattgtgaataatcaagactccccatctttaaaattcagacctagaattttatgtaacaacgatttcatctgtaacttccttttagtgcaacactcaaatgttagctagtgctaaaagtatggaagggtgtttttttgaaaagctgtttttcagagtctaaaaaaccctcaagcccagttccatcgcttctgagattttatgagactttcgaaactgactagggccatgtctgagggtgacaagatgagcaccagattactaattgaaaatacccagaactttctatcaggcactcaaatccaaaactaagagaactcaggaggctgaggcaggagaatcgcttgaacccaggaggcagagggtgcagtaagctgagattgcgcctttgcactccaaccagggcgacagagcgagactctgtctcaaaaaaaaaaaaaagaaaaagaaaaaagaaaaaaaaaagaaaactcatgggttagaatttcatgatgtttgcacacgtgacaggagagggttccgtgggtttgcagacttctgtgtaactgaggtaaaactggataggctccccaagtttgggagcacaggtatgggtgacagatggatctaggaatgcctttgcagtgggggcctcctgagtgattgttctggggctgcttctgaaggctacaaccgcaaatttcaggaactgagagtggtgaggaggaagtggaaacagcctgggtagcaccaggaatctctctgggacctcttgttcctctcacctacctcaattcttcctcctgggttaatgaacaggaaccacacagggttcaccaactcataccctcagcgctaccgggaaagcaaggcagtccctggctaactctcaaagctgttgttctgtgtcttccatttggttctcgagggcagtggagaccctgggaactgccccatccctgaccactggacacagcagcatgaagaagactgtgatccttttcttacgctgatctcaagtcatatttttttagatgcttttcaaatatgcacatcaattatttctctaggttatcttcagtgtagcatcagtacagtgtatactatattttagaatttaaaaactccatgaaagcagaccttaggtgagatttccctctaggtaccttcccattaagagcagtaggcatgtaaattaagagtgccccttgattgcaggaatgcggaaagcacaaataaggccaggtacggtggctcacgcctggagccccaacgctttggtaggctgaaacaagaggattgcttgagcccaagagttcaaggctgcagtgagctaaaaaaaaaaaaggcacaaatgaaggtgtggctgagatcttccactatgcactgctctaggcagggaagctagtttgaattttctccttgcttcctgcttctggacttttcccttgcccagggcaaaaggctcaagctaaaatcttctgattcctttgcttcttggccttttggctaagatcaagtgtaaaatcttctaattcctctggtcttggcattcagtgttggcttcaggtctgaaggtcacaccaatttgtctggaccttgttgatctacaaagaatagaatctttcctcccggcagccatttaaaaaactctcctaagggctgggcatccttatttttggaggctccaacccttcagcgtatcaaacatatgaaaatgcattcacagtccacatttaattcaacgtttttgctgtaaaataaattagaaaagatttttataattttgctctaaaaatgtttagctatgccttttttttttttttttttttggagattcagaatctcaatccacccagactagagtgccactgatcacagttcactgcagcctcaatctcccaggctcaagtgatcttcccacctcagtccctcgagtagctgggaccacaggcacacaccactatgactggataatgttttattttttatagaggcagggtctccctatgttgcccaggctggtctctaactcctaggctcaagcaatcctaccacctcaacctcttaaagtgctgggattacaggcatgaatcaccacgtccagccaaacatttaatttttgattgactatttactatcttttttatcaatcattatgcatacttgtaacataagaaaagctaactcacaaattctttatatacgtaatgactttttaaatactaaatttaaatttaataaatggcaacatttagtcaaatgttattattgatatcacttttgcagttttcttttgtaatcaaaatttttgttttcacatctcaaattttttctaggtccccgaaaaacgcataggctgtatgcattgggaagatgatgcccaatgggtaaacaatttgtaaacttgcataaggactctttgcgaacacaggaggttccctttttcctacatataggaaaatgttcaccacaggcttagttcgccattgcctaaatcatacaacgactattataaatagcaaggagcaagtgaaaatgctggtctcttattggaattgggttagtatgttaaatgacattactgtgttacttatttaactaggaaagatagttgcattaaaaaaattataaaagtaacacgtatgcatcttataacatttggaaaatgcagaaatatattttaaaaatcatccataatcctaactgcacccctgatatagcactgtcaaaagtatgctctgttttctttcagtgttttacatgcacacacattttataatacactttttactttttaaaaatttttaatttttattttgtaaagatagggccttgctgtgttgcccaggctggtcttgaactcctggcctcaagagagccttccaccatggccccctaaagtgcagagattataggtgttagtgctatttggaagctttgtgctttttaaaaaaagctttgtgctattaaaaccatagcatatatatgatatgtatcctattttttcacttatattaatatcatgattattttatgtcattacattttctgtgaaaatatcatgtttattggatgcattatatcctgccatgtgatctcccaatgttgaaatttccatttctataataaagaaaactttcatatatatataaagatatatatgatcaagatataatgtccttcacacagcttcctgtcttccagcgggggaggctagctcaagttctcatgttgctgcttggggagtggagaaggtggggtggtctggggaatggttagtctgcgcattacctgctttttactccatcttctcccagtccaatctccccaagtcaggctaaccagacaggagtcaactaactggtagattcctggaatggctgccactgtccaggaagtcccagccagctacagaagccagaagaatcaccatcgatatttaaattggagtggaaaaccccaactggctggcaccaaaccacagccagtccaggaagtttagccagacccctggaactcccagaaagcaagctgtgctgcatcatgtcaatagcttatccccccaaaagtaactcacttgtcacagttgaatttttagagcccatttattgcatttgtagcttacttattgccttttggctagatttgacagcttatgcactttaagaatggtcttccaacataataattttgcatggcaaagctcaaggtgacattgtagaaggatgaatggaattgtctcacatcttgctctgatcttttcataaagcaaggaaaagcacaaagcttccaaatagcactaagtcaaaaaagctaccacttcccttttctcaaggaagaattggaattattcgattgatagtatttttttattaaaaagggtaatataaaaaatcagagcatctaccctattcgacctctacttctggtcttgtataccttaggcaacataatatttacaccatgtagttttatactaaataaagttatttatactaaataaagatactaaataaagttgattatagtaaatgtaagcaaaaacaaaaccacaacaacaagaagcataaacaagtcagtattgggggctgggcacagtggttcacgcctataatcccatcacttcgggaggcgaaggacggggatcacttgaggccaagagttccagaccagcctgggcaacacagtgagaccttgtctctacaaaaaaatacaaaaattagctgggcatggtggtgtgcacctgtagtcccagctattagggaggtgggaggcaagaggatcacttgagcccaggaggttgaggttgccatgagccatgattatgccactgcactccagcctggggcacagagtgagaccctatctcagaaataaataaataaataaataaataaataaataaataaataaaaccaagtcagtattgggaacgttttaaatcttcttgacatgtccttctttcttcttagtgaacttggctgctggagcctttcttccatttgtgatggctttgccatctggatgtgtaacatcccaccaggccaaatgcaaaaggatgtggctgttgaggagggcatggcattcttcttgactgacacaaccacatgctcttcttgaagtcacactcccttgatcttcctcctagagaaggaagatctatgcctctcttccagacctttggcgaatgttgatggtttggcagcttgacaaggtaagcagcttgaaccaggtgggctgaaccaagaacaagcaggacatacactttgtctcattagcatgcaaaccccaaaggaaaacagcgatcaaattgctaggtggctaagtccgcatgtagtatctagccctcgagtttaaatattatgtctagcctaatttcctaacaaagtatttctgaatggaaccttgcacaaaacattttctggctacgcaaactttacatgtaactttgttatgagagataaaatattccttttttctttattcaccaaaatttcaccacgggtgctatgggaaagggagtattcagggttcactgagacgccctagaagtgggtacaccatggtccttgccttcaaagtttcttattgcccaagaaattacttattacatttctctagatatcaattgtctatcgaatgcatacaatttgagaattggattacacattttgaggtcactttgttcttctttccttttctttcttatttttagagacggtctcactctgttgcccaggctggagtgcagtggcacaatcagagctcactgtaacctcaaactcctgggctcaagcgatcctcctgccttggcctgccaaagctctgggatgacaggcgtgagctaaggtcatttctgtgactctagaactcttgcatcacacataccctccacagagcacaaagctaatgtgaaaggttattggcaaaatcatttaataaggcaggagatggcttgaggtcaggagttcaaggctgcagtgagctgtgttcttgccactgcactccagcctgggtgtcagagtgagaccctgtctcaaaaaaaataaataataaaataaataaataaataatttaatgatgtatttgtgaatggtattgtgttagatggctttcaaaacatgttaaatcaccagaaattctgtcctttgaaacctgcaagtctcctcataactacctaaaaataccacactatgcccctatctgtccctcacatggtgctattggcctctgcacccacccacagattgctgctttcctaaggcggagcctctcctaacaacaggtatccatcccctcttcctctagggtcattcagcactctgtcatcactaaattcagttttttggcagttgcagcaagcctattgtcttgcattattaatataaaattaagtataatatagctattatgaaacaaataaatgctatggaagcactgaggtggaaggatgaatttgaattaggaggatcaggaaagcatcagggaagagaggatttttgagtctaattgttttcaagggcaggatccaataaaggagtttaggttgggtggtggtgaaaggcaataattgatgatgatggtaagccttcaagcctggccaatgaaaatttgttaaataaaagaacttccagctggggtaaccgagtgatatgaatgccatttccaatataatacaagaaataaagtaacttgtggatggggaaagatgtcaaacttggctttagatatctttttttttttttttgagatagggtcttgctctgttgcccaggctggagtgcagtggtgcagtcatagctcactgcagcctcagtgatcctcctgcctcagcctcccaagtaactgagaccacaggatgcataccaccatgtgcagctaatttaaatttttttttttttttttggtagaaatgagatctcgctattatatccaggctacccttgaactcctgggctcaagtgattctcccatcttggcgtcccaaaagtgctgggattacaggcatcagccagcatgcccagatggttttagacacttttaaaagatgcctgtggaaaaatgatgtacaaatgtgcaaccaggcatttctctggggtcggggaagagtttatgagttacttgcaagcactctacattttctattgtgttgtctggtttacaaagggttttcattgccattatctactattgattttgattctaacaaacatcctataatgtaggtaggggaggattatattactaggttcaaaatagttcctaaagtgacatttgtgtctgatgatagttactgttaacataaagaacccgaggctgggagaggttaagtgatttgctcaagtaagtgggagagctacagctcagtccccgtgatgtctcactaaaaatttaggttttgggcttttttaaaccactaagagcagtgatggttgatgctggagaagcagatatcattttggatgaaagcaagcaggaaattacgacgaggggacttaaaaaacagtcaaagaaagaataggagcaaatgaaggtgaccacatgacctcccctcaacccctgaggagactcaagatcctaaagggataatggcctgtcatccttcatctccctgacaggaccaagcagtctgccaagggcacagaaggtatctactatatttgagtggagtaataatgacaacagacaacttacagcgggtcctcaaatactgtcattttgttcaatgttgttttgttataatgttgatgagaaaaaaatggatttctagccgggaccactgtttgtatttgcaggttctcctcgtgcctgcaagagttttctttgggtaccttggtttcctctcacatcttaaagacatgcacgttcagttcataggcttgtctacatgataccagtagtttttcttttctttttttttttttgttttaagagacggggtctccatctattacccaagctagagtgtagtggcattatcacagctcactgcagcctccaactcctgggctcaagcaatccgcctactgcagcctccagaatagctgagactacaggtgtgtaccaccatgcctggttaatttttgtatttatggtagagatggggtttcaccatattgctcaggctggtctccaactcctgggctcaagcagtccacctgcctcatgcctcccaaagtgctgggactacaggcatgaatcactgcccccttcctaaatggtcccagtttaagtgagtgtaggggtgtgtgtgtgtgtgtgtggtgtgtgtgtgtgtgtgtgtgtgtgtgtgtgtgtcttgcaacagaatggcatcctatccagggatggttcccaccttttgcccaagctgagcagctgggataaggctcccactatctgtgaccttgaactggaataaatgagttggaaaaatgaataaatccgtgaaacaaatgactgtaaaataaaaatatgtaagtgtacattaatcataaaaatgcacgacaataaatgagataggagtgcactcagctaccatatttgtgattgtttttgaatttcatggtagcagcaggtcctacaggcaacttttgctttgcaaacacttattccttgacttaacccagcaccacagcaaccatcgctcacttaatcactagaaatttggcaaaccattatcttgtttttatcaatctttaaaaaatgtaggtaggccaggtgcagtggctggtgcctgtattcccagcactttaggaggccaaggtgggcagattccttaagcccaggagttcgagaccaacctgggcagcatggtgaaaccccatctctaccaaaaatacaagaagtttatccaggcttggtggtgcgcgcctgtagtctcaactactggggagtctgaagtgggagaatcacctgagtctggggaagtagagcctgcagtgagctgtgattgcaccactgcacccccagcctggttgacacagcgagaccctatctcaagggaaaaaataaaaataaaaaagaggtatagctcacatttattttaatgtttaatattagaagtgttttgaatttttactttgaagttcggtgatgtttttgtaaccggaaataatgctgtaggaacttaactctttttttatatgtcagcctatggcaaatttggttttgttatatgttgttttgcttaaggtgacagtttccaagaacctactccgtgaggactggtgagctgggtcagagtaaatagcacaggatgacgactgcaaggacgatatgggggcagcagggttttagacatacttggaatggcagcttcctgaggtaggccaagtattctcagcataataagggctacatttaggtgtatctggaggaagacggtgaacagatttccacggacggtgagtgcactggaaaacaggcagggatggcaagtaccatagtgatggattggaagaaggtgcactttggggcatgattctactggttaagccaagggctctcgatgaggtccgaggttcctgccccgggcacggagtgggttggcagtgacagcccagcctattacgtgggagtctccctcttgaatggctccaggaggcccatatcgagggtctgaaaggccagacggttatccgcacaaaagtattaagttcatttcagggactgacccggcaatgtgcccgggtccttcccctcggtgctgggaagccctggtctccctgcagcatttcacacctggctgggtctcctgactcgtggcgtgggtgagtgcatgagcctccctccttcgcctgatcgacgcctgggggctcctctccccaacctcctcactctgcccactctgtcctctccctccttggggagcggcaggggacgcctagccggggtccccaggctcccgctcgcaacccacggcctcctccgcgggcagggagcgaacgcccggtaggtcgcccgcgcacagggggcggcccggctgcagcggagccggggcgggaaggcgcagcctaacggtccagctgccgcgccccgcgccccacacccagtgcnnnnnnnnnnnnnnnnnnnnnnnnnnnnnnnnnnnnnnnnnnnnnnnnnnnnnnnnnnnnnnnnnnnnnnnnnnnnnnnnnnnnnnnnnnnnnnnnnnnnnnnnnnnnnnnnnnnnnnnnnnnnnnnnnnnnnnnnnnnnnnnnnnnnnnnnnnnnnnnnnnnnnnnnnnnnnnnnnnnnnnnnnnnnnnnnnnnnnnnggcggcgggcggagcggagcgcggcgcgccggggccgccgccggggggatgcggctgcctccccgggccggggtgtagagagggcgggtccccggcctcgggagcacggcggtggaggggacataggaggcggccatggcgacccccggcaacctagggtcctccgtcctggcgagcaagaccaagaccaagaagaagcacttcgtagcgcagaaagtgaagctgtttcgggccagcgacccgctgctcagcgtcctcatgtggggggtaaaccactcggtaagggctcagctgcggcgcgcggtccccttcctcctcctcctcttcctcctcgttcccctcctcctccggctgcagctgctgcggggcggggagccggagtcagccctggacctccggctgctcgcccgcctcgaagcccccagccccgcggcgcgtgcccccagccctctgggccgcccaggcaccaccacttgcgtcccctttagatctatggcccggtgcgggtcgggggtcccgtgtgcatgtgagtctcacggtgggtgccagtgccgcccccggtccgcccgcccgcccgcaggtcggtccccgcagcctgggaggtaggaagtttgtgcggggcacggcgcctcggctgtcagccccggcgggagctgctgggggccgggtccgggcgaccgctacccggtgtgggggccgcgcggcgcccgcgtcttccgcttgcgggcaggtgtacctgtcccgggctgggcgcgtgcgagcctcccactggggcactggggcgaggataccggagcgcgagcagatttggggcagcagctttagtgcttaggtcctttctttttcctttaaaggcaatattactgggcacaagtcggctttttggcaaagcagcagccgatgtaaatatggctctggcgtcgggcggcatccctgcgcttctcccgcatcgccctgccgctgtgcgggctggagagcccttggcggggagtcttcctcccttcgtcgcctccccccactttggggagtcaggcagaagtcaccgactgcggaagggcggccggggcggggacagcaggcgggggtcccggcgggcgcgggcggagggggtcccgagttggccgcacccgctgtggggggtgtgggaaaggctggagaacgcgtggaaaggttagcgtcacgcacagtcggggattggaggatgcgccgctgcgggctatgcggactgcggttcgagggtctgaaatagcctcctgctgatctgacagcgagaaactcctgcagttttaatccacttcgataggatcaggaaacatgatcggagctgttggctcagccaggaaagtttaaacgagctgtgaattttgaccatgaccttagccactgcagtcacttagcatctggggaaaagtgtaagttcgctttccctgcttttgatttcgatggatgtctgtatgtccttttcagcgtaatggaaatgacagaaaaccatgctggtttttcggaaaacacacacacagacacacacacacacacacacacacacaccctcaatgtagtgaagttgtttaaaatgcctaaaagcatcgtttttgtatttttcttccccaagctgagcagggggaagggcaaaacagtatcaggatcgatcgtgtttgcatggagtgagtgtttttggaaaagttgagaaatgattatttttatccagcttaatgactgactcactgaagttcattttaacttcctggcaacttctttagctatttgggaatgtaagttgttacaagagcatgcattactgcaccaaaaactcctctctcaagttttattacggaaaatgaaatgcaatttttcctaagtaataagtttacaatgtagagttatgtataattttgttaagctcttttattatttatgttagtagtttttgggtcccttattactagaatagaaacttacaatttaaaaaaaggatgaatactgtagtgcttactcatatttatggtgcttttatctcctttggagttctggtgttttggtcaggagagtgtttctgtctcggggtttaatttagtaaggtagtgtcaacaatatgctgccgaaaaagagtgtgctttctgggaactcgtctgaattccagtttgccttaaaaaatcttgtaattgtgtatgttttactgtaaccacttacgttgctaccttatatttatgaattgctacatttgttttagagtttcttgctaattggaaatattttgaaactacttaagtgtttcatagtgtatgacttgtaaatagtacatttggtgttattttcttttgctctcaagagaagttggcagttctaagtatccacaaccagaggagtgaagtttccatttcatataaatgtaagcatgttactcattcaacagatatatattgggcacatacagtgccagctactgtgggaagaattgctaaaacacctctaatatttttatccaactgtctttattttgagggctctgagttgacataagaaaggtctgtttcacagccttttttttcaaaatgtctattttctttactatattatttttgaaaaaagaatggaggtgtaatataaacatgaaatctaaaacccttagatgccatgtatttctggtttgatttcattttaggtgacaatgtctgatattagataaatgttttatatgaccttctgtgcaccaaagtttatagtataatgtgagaataaatatgtcagcagtcttaagaacaaacaagcatggtgttgtatacgagcatcttccacatactgtggtaaaacgctcattgaatctgcgctttaagtttttcttaaattctaactgttgaccttgggcatgttaaggtcaggttttggcatcagtgtttgcatctgtgaactgaggttgtttggatgatttccaagtctaactcaagattctgttttttcagtctactaggtgcacagtgttatactaggatttgtagaatactatataaaagttgtcttactattataaccttccaaatgcagcaacattcagggaattttcaagaccttgactacaggggaaggaaatctatggtgattttaagagactgtgaactaagggtttgttatattgaatgtagctgaactgcattgcagtctattaagccaaagtcgatttgattgaaacataacaacttgcaattaaggtgaaaatgttcaagtccattgaggtggtaatgaaaatcttgatttgggcaatggtcatagtcgggagtaagcctgccattgtgtggttaatttgatatgttactgctttgtaacttaaaatacccatcagtgaatggatcagtgccaatttttaagtattttaagcagagaatataactgaatacataaaggaaaagacttaaggcagttttgtcttgttacatttagaattaaactaaaaatgatcaaacagtaagcgtcttaagatgatattttaatagtgtggggaggatgttgaatgatatgagccaagacttgttttaaatagatactctaaaagatttttatccacagtgaaatgtgagccttttagaaattagtattttaaaacctatttaaatatccaaaggaaaacattatctgtatagaaaaatcttaaagcacataaaacttgtttaaaacatgtagcatttagaagtagctaagtattgatgttagaggcttttggtttaaagctgtagaagttgaaatgagctttggcaaaaatgtcaggtattgaggggtttggggggcctatcacagtagaaggaaaggctggtaatggaaccatgtgaagagctgggtgcttgagtgtgtgggtgtgtgagtgcgtgggacttttctgtaccctttggctcagttctccttcatagctggctggttcctccacagagcagggaatgaacggttcctgtatttcacattttgtcatttctgctcccccaaaagggtttcctgtctctaattcagttataaaaataccgtggaaggattccacttgggattggtctggccttggtcatttgtggccgtcccttggactaagcagttataaaaacatggcagcgcttgcctgttggcgttggggaaagaacagtccccagagaggggaaagggcctgccaggcagtttcaggcaggtctctgtccgagtaatagagctggatggttctggacatccgtgggtctttaccgtgggaatctgtgagggccagcctgatgagcaccatgtgctgtgttgtgtgtggattggagaattcatggtgtccttggtggagcgtcagtagctttgattatattctccacaagctctggtttttggaatagacaaagaccatattggatacatcataatttttttttttttttttttggttcatgggtttttatttgggcactgaaagaagataaggaaactaagttttaaagtgatttgagtgactgtgaaatgactttgactgaataggacataataaggcaattacattaaaattaaaattagacattagatgaaattattgagtggaacccagctaccattcattcaagaactagtctcctcaaactatttttttgttctttttaatcttcagaggaaagaaacataccaagcagacatacagaaagtttattagggaagtcgttttatactccttaaaacttgggattataaccagagaacagaatacattttcctctccatttgtcagatactttagagtgaactctaagtatttatacttagtacttagtgttacttagtacttacagttactaaacttcagtactcagaatgatgccccatgtcaggtcagtgatttctatttccagggtatcctgatctgctgtgtctttagataggttgccggcaagaattataataaaccaccaaaatctgccttaagttgattagaaaatacaggcaaccagagtaattaattctgccagcatagccttcgaaatacaaattttggaattgaagggaattggtgcaatttggcaaaaaaggtttgtggttagacagatgaggttcaaatgctaactttggaactgatgggctctttgagcaggtgatttagtcacttgagcctcaattttcacattcttaaaatggagataatgatatgacttcacagggttgagagttaaatgagatactgtgtttaaggcctagcactgtaattagcacatcataaggattcagtaaatgatgcctaaaagtaataaagttcaaatgcagtttggatggtgatatattaaaagaaccagatccctgtttctcaaaatttaaggtgtttatcaatcggggacttttaaaaaaaaaaaaaaagtctgctaaattaggctctgctgctgggtaggtggctcatgcatgtaatcctagtcatgcattgggaggctgaggcaggaggattgcttgaggccaagattttgagaccagcctgggcagcatagcaagaccctgtctctacaaaaaatgtaaaaacatagatgggtatggtggcacacacctgtagcctgaactactcaggaggctgaggtgggaggatcatctgagtccaggaggtccaggctgcagggagccatggttgtacagtgtactgtagcttgggtgacagatggaggctcccactaaatgtgaaacaataaaaattaaaatgcagtgtctaattcagcagatctgttgggagtgctgcctgagactgtgcatttatcatactctcgggtggtactgatgctgcaggtccacaggctacatagcagtagaaggaagaactttaccactaaggattcctcccccagccccaactgtatgtgatgagcccttagaagaatggtggccccatgatagattagagaatttgggagaagaaattgtaggttggaaagggacacaagcaatttagatttaagaatgtggaattgcaggtgatggtggtgggtggatcctgcagttacagtaccatgtaggatgctggaaaggtgtgattggagctcgggagccactagggctgggatagaccattgagacctgcccgtacagaatcggtaagtcagatctccaccggaggagcagggacactggggacacttggctttgagggaaggacagaggaagaagaaacaggaggagaaaacagaggtcggcacaattagatgttcccaagtgcttgaaagtcatggctgtgcttgtggttgattgcgggtggctgtgaaagcttaaagacttaaggagtgaatgagtggaagtagaggcaattcctcttttttggaaggtaagtagaaggaaggtgaaagatgccattttgttaggaatccctggggagtttccttgaatccgtctcttcgtttccattctcacttctgtcactcctaaccagatttgtttccctctttcctagactgatattaaacccccctagcttatttccctgtgtctgcctttatcctcatttcttttcttttttgtactaggaactcctatggcagtccagtgaaggccatagactcctcagaatgaggcttttaaaggaataaatgaaaatacagaggatatgtcctagcaagttcaaggatccttttaattctatccatggaccacttgggagttcatggaaccccatcaagaacccttgcaagaataagatggggatagtgtggggtgagaaagtggggagagcacgcagcagccaggaagaattcttgggggggaacacgcataggctgaattgattacccgcctgggtcacagtgcctagtacttgggattcacaacggtaccgttaaccactgagctgtgctgcctgggccaagctcaggaatcattcatttctttgagttcttttattttcttagtcttaagagctgttcttcttggatggacagagtattagctgttaacatgggagaaaactacttgaaaaccagtttttcccttcatagaaagaaaatcattgttaatgttcagagcatgtagggagagaaccagtacataatttatttaagaaaaatgttgtagggagttttaaaacagtaacttacctaaagctaagcctcacaattctaaatctttatagtttttcagctacctgggcacagtgattaagagctctggagtccttgttcggttggctatgtgaccttgaacaagttattttgcctctcagttccttgattataaaaggaggtaataatggtacctactttggaagtttgttatatggattaaatcaattcatacttgtaagatgcctaaatagttgctggcacatggtaagttcttaatgtgctagctgtcattattactatcctttaaaatagagacagggtcttgctgtattggccaggctggtctcaaacttctgacctcaagcaatcctctcacctcagcctcccaaagtgctggaaatagagccttgagccaccatgcctatcctatttttttttttaatatcttaaatgctaagaggtagcaaattatcagattgtatgctaaatcaatggttactttatcctgttttgtagtagaacatcatcgttgttcttggcatccttgtgtatttttgagttatgaattatcattttagaattacccttgtgcccttgctttgctttctgtatctattttgttatgttctttcttgtatttttcacacttccactagcgattaggttctttgaagtgtcagaaatctaattcacatccattagttgcaagttatgtcagctattgacttgatatttcaccttgtctttaaatatggagacactgcaagatgcttcagatgcaaaatgaatatattgtggaccttgctctcaaattgtgcataactacaggggacacagacgtaaaataaatatatgtgtaaataactacagtgtccagaatgctaggggtggaaggtattaaatagaccgtgcagaacattgagcaaaggcatgacgtcggtgaagggcttagacatgaggcagtttgggagaagagcatttcaggcggaggggtcagctggtgcaaaggccgtgaggctggtgtttgcttggcttgttatggcaactgcaggaaagctggcatggctggagcacagcaagagggggatatagtggtaggagatctgccaaggtgctaaccaggactggatcatgattacttctgcctgggggacttggagaatccttgagaggaggtaacaatgaggaggaccttgaggattagatagaatctcccagctgcagaagatgggtgatatggtttggctgtgtccccactcaaatctaatcttgaattgtacccataatccccaggtgttgtgggtggatcagctggagataattgaatcatgggggcagttttccccatcgtattctcgtgatagttagttctcacgagacctaatgattttaaataaggagcttctccttttgctgggtgttcattcttctgcttgctgctgccatgtgaagaaggatgtgtttgcttccccttctgccatgatcgtaagtttcttgaggtctccccagccctgcagaactgagtcagttaaacctctttcctttataaattacccagtcttgggtatttcttcacagcagcgtgagaacagactaatacaatggggaaaggcatatgcagctgagggtccgacagcgggcaaaaccaagcagagcggagaatgtgagtagttggctttgggtgtggccacagtggcagaacccagtaacatgttagaaatgcagagcttgggcctctgcagacctgctggagcagaatgtacattttaacaagacatgttgatcgtcagcatatttaagtctgagaaacacccatcagggtaaatctttggtttcaagccctgagattccttagatgtgcctcaggggctggtgggagggggccaagctggtgggggaatttaggcctacctcagtttcctccagaacagccttgtttttgtcctcattgtcatctctctgtccttttttttttttttttttttttttttttttttttttaactggggtactgaatataatacgtaaagggggtaaaaaagatcctgcagccaagaaaattgaaaaccacagaggaacataaagggagtgtcaggagatggttgaaagagtagtttgaggccacctttgaagggccaagtggttgatgtttgccagagaaaagccagcagttctgaccagggttactttaaaatttgccacaaatctcaaatgacactcgacccggaagtgttactgcctcctttaatatgttctccactctctgaagtcatttcttccttttcacttctccttgaacttcacctagtgtcctgtcccccacttcccccaccccgtccttccctcagcatataacctcatttagaaagcattgaacaaatagaagccgtcagcttccactcttcccaccatcccatctaaattttggacagctgggtccgtcagtctacagacatgctggaggggctgccctgcctggttttgtagctgctagctatatatggcaatttaaatttcagctaataaaacttaaaattcagtttctcatatcaagtgctcactagccacatgtggttagtggttactggattgaacagtgcagatatagacgattcccaccattgcagtgtcttccactgacatggctcaccattccggggccgcccatcttgaaagcaaaataaactacagtaacagcagaagctctccttcacccttagtctctcattttagtgtcttctcgtgttttctgttccttttttttttttttttttttcagatgaggtcttgctttttggcctgggctggagtgcatggtgcaatcatggctcactgctgcctcaaactcctggtctcaagcagtcctgcttcagactccctaagtgctgggattatacatgtgagctaccacacctgccctgttccttttcatagcaggagtgaaaagccttgtctaaagctgaggtctcctatttctatagagacaccgtacctggcaaccgtcaacttacctgcgatgatctccttaacttaccccaatctagctttcacctccagcacacctaggaaactgctcaagtcagcatcactggcagtgctaacattttcaaatgcagggggctcctttttttttgtctcttgttttccttctgcttcactagccactccttaggtgcaggctcctcttttgctcagtctggaaatgttggaatgccccaggcctgtgtccaggatcatcttctacaattacatttactttacctacatgatttcatttagtctcatggctttttataccattttacagtcatgattgagaaatttttaacttcagctctaactttcctcttgggctctatatgcagtttcttaccaggtatcttcacatgaatacctaatagacatctcagatgtcccaagcaggcctcttgatttcctccctgcactctgccccgtcccctgtcataacttaaactggcctcttcccgtctcagaaaatggaccaccatagacccaggtgctcaagcttaaacgtagggagcaaccttgattatgcttttttctccccactccttctccacatccaatttttgagtcccgaatccacatgctttctatttgaatcttctttctcaggaacactgtggtagcctcctgtttggtctcccggcattcagttttgccctgtttcagtccaccttgtctgcagcagtggcagaggaatcttgctaaactgtagatgatttcatgtcatgtcctcagttaaaccttccaaaggctttacattgcatttagaataaaatccaaaccttttctgacctgcaggatcttactggcctgggccccactttcctccttgccctcatcccataacaccctcttcatgattcctatgttccagctgccctgcgctttttctgttcctaaaggcaagctcagagcagccacagttcttcagtctttatttttctcttcgtcgggaatgtttttccctcttttatttatttatttttttatttgagacaaggtctcgctctgttacctgggctggagtgcagtggcatggtcatagctcactgcagccttgaagtcctgggctcaagcaatcctcctgcctcagcctcctatgtagctgggactacaggtgtgcaccaccatgcctggataatttttataatttttgtaagagatggggggtctcgctgtgttgcccaggctggtcttcaactcttggcctcaagtaatcctcctgcctcagcctccctaggtgctgggattagaggcatgaaccaccatgcccagcctgccctcagatctttggatggttggctcctattagttattttagtctcttagctaaggggttgccttctcagatggcctctctgacctcctaagctaagggagcccctccactatcatactgttattttctctgtgacacttaacactgtttgaaactgagttgtgtacatttttattgcttatctccctcaactagaacaataagtttcatagcaactgagactttttcctatttactaggtgtatccctgcatctagaacagtgtgtttagatagtaggtgctcagtacatattgttgaatgaatgagtggggctgggattctaaaccgtaggccattagttctcaggtggtataccatgaggcctcccatattcaattttcataaacatagaaagttgacttttgttataatcaagcatagagcattttagagcattttgctgagcgggttgtgcagtgtgttagagagtggggaaaaacttgctgcaaattggtgataagaggtatggggtaactgcaagccagtgccaaagaaagaggttatgtttacagcagcatgcaagaactgtgtcttgtgaacacgacagaaaaggttcagaaagtaaacaacttctttcaaacagtgtcagatgttgaagggccgccaagtgaactgcgtgaagactatgaatgcatttctaagtaatctgagatattatgttagaagagtgtgctgcagtgttattactgacttgttcttttaatggcttcagacatgcctctaaaaattgtagtattcagaagtgtaccataagttaaatttaagattgcataaacattgtaagaatagggataatgtcagtatctcagtcctttgtgggtctttttctattgtgtattgtttctgctggttcttcttcatggtgccttgttgccatttatgtttggttcattttggctctgagctgctcacttccttggatagtcattcagggaacattcttcaagtcttaagataaagatgtatccttccagagagaattgtttgtttttgccacatggctagggatactggagaccaagaccatttgaaactaaattcacagcttggaattttttggacctcatggtgatataaaattgggctgcagtccctggggtggcatggttttatttttggtagacccattgtagccttatggagaaaaggtttcctattagacttcacaccttgggtgggccctagtctttgtcttctgttcctgtcaacccatgaggccatcaaagcccttagagccaaagtggcttccatgactaacttattcttcctgcttccagttttcactaagatcttgacaggccgacttctctcctccctcttccaactctttcatgccttcaagaagatgtttaagaacatattttattcaggacgcttacttattttcagtgcagagctgacctgaataaccctgtcagcagaaatgcaaatcaacctcaaagtttcaaaagagggaatccaacagtaagtgagacagtgagaagccaaagcatggtggcacttctgcagccttccagggatggatctgtgaggggagtcagtgggacaggaggtgggactgcaagaaggaagaatgccatttctgtcttccagaggtgatgggaacctgagcttgggcaggggtaacagacattgttggataaccaggtatagatgtggtagaagctgtgttgtctaagtggcccatagcctaaaaggtttgaagatactgctgtaaacaagcagacaaaggatgtgcttagagagatttcaggtagaatcagctggatttggtgactgttaggtaacaggaaggaatcgacagtgactcacctaggtcattttcttaccattcacactctccattacattattgttatttgggggctgttagcttctggcgggatacccctgcccctcttgccacaactgggattgtacacacagatactgtgagacagaagaggattaataaactgccctgggagagttagtggtaggctcttgaaattcttcaagaattgaattagcgtggtggatggagaagctggagaaaacatgttacaggcagagtaatgcatagaaaagcataaagggtatgtggcatttccagggaactgccaaacccttcttcaggtgcttctatacttctctccttctgattttatggttttattcatttccattcttatggacatgttcttatttaaattacttttgtttgtgtttctgtaggcttggtcatttaggcttagaaacatatttgcaagttgctagacaccctaacattcagagcttagtttatttgtagttgtaataaataagccttgcttttgttttttcagcctggactttgaggaaggtgttaggtattagtcaacccgagaatgacctctgtagcattctacatgacctgcacaaaggctccaggtggtaggggcaggtgggggctgacgtcagtattgccacctgcacaccatagcaaggggctgcattagcgggagacaggcaccctttttgtgagttgtccgcacagaggaggctcattttctgatgtgcacagaggtgcctgtgtgctagcagctgccctggtttgccttgcttttctcgggtcatgcatccaaaatttctcatgtcacgttcccaagcactggtgtctttggaggagcgttcaggtggtgttcagtctggacagaagaaaagaaagtggggtttataaagtccccttatagatttgaatctgctttagaaaatgcaccgttgtgcagtctttgctgctgctacatacatgcttctataatgcagattcacttgtatgagatcggtgctatcgggaatgtggtgtaggatgtatgaattggtccataagcagttttccttgagtatgccactgcctccaagtatcagcagctaggtgcaaagtacactaatacagctcaaggcagcaagccaaattgagaaacaggactgcataccttgctcttgtatccgttttcttcctcctgactccagcaggcttctgctcgatctcagaagtactcatttcagggttctctccaatctctggacattttctcctagtctgtgtaacttagaagcttggttactccttgtattccttccatcaaatgatcctcacctttgtgtttctaaagtccattatatatctattagaaattacactaaaatactgtttatttttctatttttaggatttttatttttaagcattctggtgatagagtttcatagtttttcagtggtctgcctaaaatctggattttagtgtctatgtagaacttagaaatttttcagaaatacatatattgcattacaataaaagtgtttgtatttacaatgtattttgaacaactatatgcccaggctgcaagtttcccaaagaaagatgtaatcgttggtttttttgtttccaaggataaccaggtatagatgtggtagaagctgtgttgtctaagtggcccgtagcctaaaaggtttgaagatactgctctaaacaagcagaacattaatttatttgtcggccctttgagttttcttactaatcctcttctggcctgaccatgtgcccctcccaagtttcgcacattcccaggtatctagtgtgttcagttgtctccctgcgctactcagcagctacctttttcagcattggccctagcttgcttctgtgcccaggaacaggaacagaagttttcttctcaggggtcccctgtctctcttagaccaagtccacaggcttttactacattaggccttggagtacatttcctgtagaatcaaagggccaacttacaaatgaatgtttggaacacaacccattcataaattaggttctgcctgcacccagatggaaagttaaatgctttggcatcagaagaactgttgggaaacagatattgtttctgaaattatgataaatccataaggcactttctttttggcacgttgcgccaaagtaggaggacaggagcaaattttagggacattaaaaaaataggttaggagaagctaatctttttgtctaattcactttctcttgcagttctggcatcggatactcacagatttaacacatgccaatgaatatttgagccaggaaatagccaatagtgaatatttttattatgtgttagataaagcttctttcttcttatgcttatttaggtgaactagaaatatggtttcagtgaaatttaagttctgataagtacagatacatagcatattttctgaaaaatttgaaaaacacacacaaatataaaaaattaccataaccattctatcaagcaaccagtgttaatgttttaatgtttctttccaatgtctttttaaaaaaatctcattgagactattctatgtatttaatcttactatgtattcttaacaattattttaaatttttgatcactgcttaataattaggttggtgcaaaagtaattgtggttgttgccattactttcagtggcaaaaactgctattccttttgcaccaacctaaatagtttaatgaagtttaatagtccaaacattggtcccagtattttgccaccacaaataatgttgctgtcagcatctccctgtatgaaactctttcttatttaggatgatttccttagaagagattctctttttggggaatttacttggtcaaagggtatgaatattttaaggctcttggtacatgttgccaagttgctttcaaaaagggttataccagattataaccctagcagtgtggctaagagctgctttcccacatcttctgctttcagggttctaaattgaacagcaaagattggaataaaaagatatccttttttcccatatgcttttaacccatttaaatctctttatagagattttcagcagtttgaccaaagatgtacgcacatgggcagtgtgggagtatcaggtctgaggttggaagatggcttccacataggctgcctggcccgagtctgccctctgaaaagagctgctttcaactgacccacttctcccagtttttcttcgtcggactctaagcagagagtgcctgcatcccagaagcaggtcgctgtccactgtctgtggttggttaatttttgctggccatagcccacatgatttatattaaactcaatccaatagcatttaatggcaggcagaattcttcccatgtaagtagactagtcaggaatttgcctttcattatcctcggtctgactgcttaacgttagactcgacctatggacgattcacatgaaccgtttcagaaaatgtaatgtgacatctgctagagtccacaattacagggtgtgtgtgtgtttgtgtgtgtgtgtgtatgtgtgtgtttaattttttaaaaaattttccgagatgcagttttgccctgttacccaggctggagtacagtggtgtgatcatagctcactacagcctcgaattcttgggtacaagtgattctcctgcttcagcctcctgtaatagctgggactatagttgtgtgccaccataccccgctaatttttaaaaacaaatttttgtagagatgggggtcttgctgtgttgcctagtaggatagtcttgaactcctgggctcaagtgatctttctgcctcggcctcctaaagttttgggatttcagacatgagccaccacacccagccttgctttttaaatgttggatgttaccatccctctactgtggtcctgtagtttggcttgaagcttgattctgtgcgctagccactctgtcaagaattatgtagtataaataatgccggtcacttgtgctgacctcacaaacattccgaagcctggcaaggcaggtgtggaagctcagagctttgccatctaactgagtactcaggcttctttccatttagataagacactcagaaaggaaaagcaatgcaattttaatttttacttaacatacaaagtagccttttttttttttttaagctgaaggaaatgaactccagagaacactgaagaaaattgaaggaaaaaagtagagctcttagaaagaaaggaaaggtcacgcttataaactgtagccatctagataaactgttatttccactttatgtggatgtattttattgtgacagtgctaactacagttgccaattttcaggaggcctaaattactgactattttagatgaattcaggctttaaaattagccctgggataatatatttcttttaaaatgggaccttaattgatccttattttttaaagcttgaattaagtagaaaattaagggtcttttgtaaaagatgataatatatatttaacttggatgattacctaatagagaattattccttgttctagtattttaaaatattaaatgtttgacacaaaaacagaccattctgaataggctttaggaagtaggtgacttttcagtatgaataaactatatgtaatttttcattaacttcaaaataagaactttaaaaattatggatataaatttttatgccctattttaagaaactaccctttttttcttatgagaaaaatgtctgcaagattgaaaaaagcttccatatagagtaatacattgaatgaaatgagttgttttctacttaatcagagtggccaaaggctatttcaaaacaaatttattcccatttctgaaccttcaaatcaagagaccatttaaggattcatttcaatttggttatttataagaagaaaagactattctgatggcatgtaggatggtcctaaagtaatcggctcagctaaaaacacacttataacagttgggcatgtcagctgaggagagacccttatagcctgtgtttcctacaaaaacaaaaacacagttcttttatgaaagtagacaagttgatggtatatttgggctaaataaaatacaatgttgacatatgttgaaatattctatagttgttacacatgttggctgaggtggttgtactgatccagacacatggctgatactttgagtgggaacatagccagtgtggttttaaaatattatgtccctctgaggagggattacagatgattttttgctttctacttacacctttttataggtttcttacaaaaatattgcgcatgcagtcttcttacaattagggaaaaaacccaagacatgctctaaggtgagatgagtggggggaagaaatctgtatacagtcagccctctgtatccaaggcttctgaatcttcagattcaaccaaccacgggtcgaaaatattaaaggaaaaaaatgaaaaataatataagtaaaagcaccaatacagtaaaacagctacttactgtgaccatacattgtgttaggtacttacacatggactagagatgatatagagtatatgggaggatgtgtgcaggttttatacaaatacaatgttttgtattagggacttgagcatctggggagtgtggtatcctggggagtcctggaaccaatcccccaaagataccaagggaagactgtatattgaattcagtgaggcagaaatgacttgtacattttggtttgtgaaataaaatattctcttcatataggggatttttctctctgtgtagctctcctaggaaatcccttgattaaaagaaatattgattgtactgggagaaacaaataataaatgattctaaaagttgtcactttttgtgagtttgggaaaaacaaggataaactgcagtgatgaccactaatttacctacaggtatccaagtttttattgcatcttagcagtgaaaaaaatcggagcatgtgctctcaatatatgaatttttatttataagttttcctgtgtgtactactgaattattttgtcttatacatagaagttttaaaaggatccactgacggtaaatattagtaactaaaacttgttttgttaaaaattattgatagcgtgaaaaattatcattagtgtgtagtggattttattttttcaaatgaaggttatgtggatgagtttgtatcactgtttttaaaaatggtgaatattttatgataaagcaatttgaaggtctggtcctatattcattttgctatttggttttaatagctcaaaaagttacctacaaagatacacggatccaaatgggtgaagtgcattgttgactgtgctttctaactggtgattctcattttcacactgtccaccagttagataaaaatttttctggtaaatttccatttttgtggatagcagtaagttctcataaaatgtgttccagtttatgttaaggataaagagggttgaaaataaaaaactttttacatttattgaaaattttaaaacagatgagaagtattttataagttctttgtacaaaagatacaaaagcacatctcttttcaaaatactttctgtacagtctgagtttcttttcaaaaaagcagttattttcttgcacttcttaaaacctcatctttaccttgaagggactgattaagtaaggtcattgaaaaaaacatctgccaggtattactgacagccacttgtgatcacagagtaggtcaggaaatttggagcaaattgtatttatgtaagggaaaaatgtgttaatcattcttaaaacaattcttctatgtattttgccacaagagaactggaacacctctgtatggtacaaaacatttttggggtcacgccccacctcattactgaaaggctttgttttttatactacatagatggtagccctacatgaataaattgaacagatgacagagggacccactgccacatcttgagttatttaagtggcatgtgacatctaacctgtggacccaaataagggctgtcagtgttggtaaaagctgcatttcttagcttttaaggtaaaattaagtgtaagtagacattctgacagtttcttcttgcactcagtagattgtcttgcttacccctcgcctatacacatcacttagattttcaggtacagtaaccccttggtatccccaggggattggtactaggatcctgcagacaccaaaatcctcagatgctcaaggccttgcagtcagccctgtggcacccaggggtatgaaaaggtagtccgccgtatccatgggctctgcatccagccagtaatgtatttttgaatcgcctttgctttaatccgagggctccgcatactcagataaggtgtgtaaatgaaggagagagtgactctggacttaacacctcttttatcatgctctcttcatttcttggattccattaaaaaaaatcataacccatcagaaccagatggtagttgtaattttttttttcctaatcccttcatgttatagctgagaaagctgagacagtaaaataaagaaacagtgctcagtgatagagcgaggaccagaattatgtctcccaacgcagcaccaggctgggtgtgtgtgttaaggtcatctgtgggtagtgtgtcgatgactaagctccccagatgggaactagtggagatctgttgatatctgactttctaaaaactaatttctctctcagatctctcggctctgttcttttgtttcttaaacatacggccttgaaatcatctttagtttttgtctttttgctttcttatagacacatgctttgtctagctattactgaaacataaagaatactcataaatagattctcatttcctgagaagttgccttctgagtgaatcaacatgccatgtagaatcactcttggactctttttagtgatgatggtgaaatccttgtatgtattactctccaaaagccttaaaaatgttaacaaagaatacataggtaaaataaagcaaaatgcaatcagctaaaaaaaaaatgaagttgtaaagatggggagagaaaaacacatttaccataaaatttttcacagtcctggttaaggaaattgacattggaacttgaaacttaggtttgaatttcttagcaaccttgacaaatctgtgatctaactatccttgtctaatgggaggacagatactggtttattttcaccccctgattctaaggaaaacttatgaccccaatcgattaaaacaggactaaaattaatggatatgcagaactatttgttattgagtcccatgaaagccaaggcaaaatgggacacacaccaggtatcagagtgaggcagcccagaggtacggctttctcccagcctggctgtaaacagagatcagccttgaataaatgattccttgacgaacattttccagtccagcttggtgaaaaattgagatcactattgagtgcctaaaggacatgttttctgcattgttgactgaaagaagattcctataccatagttaccttggtatgtaggtagtaaagaccttgtaccattgggtcaaatgagaacctcacttgtggtcttgtatgaagggctgttccatctctaagggaaggccgtaagtggggcctggatatttctgagaaaacatttgatggtagtactctattgaagccccaaattctaagctacagagcagaaaagacaacgtctaggaaaagagacaccaagtgcctacccctttcacagaagaatctagctgcagcttctgtaatatgtttatttagaatcacatcccaccctgccctagttctcaaataatctagtgtggattttagacaattttctgttgtctaagacagatccccaacccctactccacagatggaccagtagtggtccatggcctgttaggaactgggccacacagcaggaggtgagcagcgggcaaaggatcaaagcttcatctgtatttacagccgctccccattgctcacattaccgcctgagctctgcctcctgtcagatcagcagcagcattagattctcataggagcgcaaaccctattgtgaactgcacacgtgagcaatctaggttactcactccttatgaaaatctaatacctgatgatctgtcactgtctcccatcacccccagatgggaccatctagttgcaggaaaacaagctcagggctcccactgattctatatattattgagttgtataattatctcattatgtattacagtgtaataatagaaattaagtgcacaataaaggtaatggtcttgagtcatcccaaaaccatccccacaccaccccagtccctggaaaaattgtcttccacaaaaccagtccctggtgcctgaaaggttggggactgctagtctataagatggttttctattgcacagtccagactgacaatgacaaggaatttagaatctcagctattgttctatttccagcagctcttcctattgattaactatgagaaacatatttttaagaaggcttatttttgggaagttagagttgtgttgtttgaggtgtgctcctgaaagctgtttactcaaacctttatgggtcaagttttgtgctgggagcagggtttcccttgtagtgaggagcttacacctggaaacatagcaaatgacgcaatgggagagccacctcactgtggaatcaggtagggcatacatacagaaatgaattttaaatgttaaagtatttctattttacacaaatgatcatgtgaggacttagattttatgataaaaagtaaggaataaaatttgaaaaagctttataagaacttctggaaaacaaaagcaaaaacaagtctccctggtataaagatgcatatgcagtggaaggaaatgtactggggtggcaatcgagcatcctgggaggaggagaaggggcaagagtcagaataaacatagggctctgtcatgtataggtctgaagaaaagagggccggtatatggatgagcatttcgggccttttaactacagagctggaagataatgcaggttcccaggaggtaggatgacaaggacaaaggagggcaggcctgaactattcaggggacgagctctgggctgttctgaatcgcagatgccatcctgaattgcatttgtgtcaaataggctgcagtggttcatgcatacctttgcttctgtttggcacacaccgtctgaacctcaggcatttcttaagactttaccaaaaccattcagttttcttattgtaaaatcgagacaccaccacctcttctgtctcccttagggggttacgtgggggaccaaatccttttttctaccctggagcaagtgccagcacagggaggtggtagaaatgtttgctcaggtgcccacagccaattgatgccccactgctcttgtgtttgtattgaatccctttgttaatttttttcttgtttagaggaaatacatatggtgattttgcaatcaatgcagcattgcataataattaaagggctagccttggggccagactatttcagattctagccctcccatttgccttgcatgattacttatctcaagctcagttttctcttctgtaaaacggttatttcttaccatgctattaagaggacagaatgaggtaaggatgacccaaatgtcagtccatgtgcactcattgaatcttagggtttttcctccccttctttggtatttgtgctctttgaagaaaagagcacatatctcctcttgaaagaggagatatgttgggtttttgttactctcttccacaagaggagatgtaaaaacttttcaaaattttatttagtatttcagcttgtggaaaacacattaagatggcaaataatcttaaaataaattagtggagttaatgatttccaagtagggggaaccctaatgatttaaatatgtcccgatgctgtattaacttacagagtgtagcatagtgcctgagttcagatttaggagcctactggctggactcagcacttattagctgtgtgaccttgggcaagtgaattaatctctctgtacctcagttttattatttatacaacgtgggtagtattagcacctagattttgggattgttcccccaacctctactccaaaatagggtttttttgaggtttaaatgagttaatatacattaaacccttagaaccatgcctggccctgtttgctgttatttattattgttatgatgctgctgctgtagtgtgaataaagtcaagagtaatttaagttttgagaaatacttaattataataaaatgtctttggacaagcagttataaggatttttttttccccctgcagggctcaagtgtttgaaaagagtaagtacattccagccttattcagtgatgtccttacagggaccttgcttttgtgcatcagtcttttgtgacatgaaaatgttgctaaagaaaaacttgagcagttggtaaagacatcgcaaggtgttgtggcaacaaccatcagtttgcagtgattatgctatggttggttgttctcatatgtttccactttctttgcagtaatacctgtatgcattatttacaattccaaattgaagccatccattcctttactgtcatgcaccttgaaatctgtgtacagtcatccctcagtatctgtgagggattggtttcaggaccactccccataccaaaatcctgaagatgctcaagtccctgatacaaaatggcatgatgtttgcatttatactgtgcacatcctcctgcatgctttaaattctgtctctagattatagtacttaatacaatgtaagtgctatgtacatagttgccatactgtgttgtttagggaataatggcacgaaaaaaagtctgtacatgttcagtatagctgcaaccatggtaggcctagttacattttccatcggatgcggaacctgaaaatatggaggacctgttgtgtgggcttcatctaggtgattaatgacatagcagagcagtgtttttttgttgttgttttttaaaaatatttttcaatgtacaggcctttattaactgagtgctcagaagtaagctcagtgtgtgtcacaagcatggagatgggggattgctcccaaggagaagagagggggtgaggggcagcttggggagtgaggaggggaggaaggacagtgggaccagggctagtcccccacctccgacaccctagctcctgaagagttccaccagacccacccttgtgctcctcgaagaaaaatctgctaaggaagaagaaaaagataggttagtgtttttaatgtgacagacaaatgaatctttaagtgattccttgcatgaatctaattcttgatgatagccaattatttgagatgggtgataaattataacaagcccagaccttttacccttggctctgggtatgcatatatgtaaggaacttaatggtaataggaacaccccgttatccagtctaataataaaccactaattgtaccagataaaaaatattatgaactgaagacctaatattgttgaaatgtcacaacttctgtgagtaaaacatttcagctgggcacggtggctcatgcctataatctcagcactttgggagtctgaggtaggaggatcactttagcccaggagttcaagaccagcctaggcaacgtagcaggaccccatctctatgaaaaataaaaaaattaaccaggcatggtggtgagtgcctgtagtctcagctactcgggaggctgaggtgggaggatgacttgagcccaggaggtcaaggctgcagtgagccaagatggtgtcagtgtactccagcctgggcgacagaggaagaccctgtcttaatcagtcaatcagtatttcatgcttttagatactttgtggttttcccaccagatactgtcactactatcaaagaaccacgtaaggaaattctgtaaatggttcttaactttgtgccagacacctgagaatgtgcgcaggtttattagctatagtccttcatcttgagtctgtatagaatcctgtcctctcctgatactgtacgtaagttactcagtgttaccagttttcttttttcttcatgtcgctttcttactgtattcagaaaattttcttctttaaaaatatttcagattattgtcactttggtggaccctttactcgtctctaataaaatgtgaactgaatacattttcaggtgagatgtttcagttcatgctgtggggtctcctgtctgtgtgaagatttgacctatggtgtactttctcttcattttttcccctatttctttttctaaaattaattttactctgtatatttgaggtttacaacatgatgctatgggattcacagagataatagtgactatagtgaagcaaattcatctatcaatgatctcgcacaaagtaggccctttgtatctgcatgttccgcatttgcagatcccaccaaccacagatcgaaaatacttgggagaaaaacaaataataatgtaacaatgagaataatacagattttttaaaaatgcaatataactattcacatagcatttactttatatttgggattatagaaatgatatagagtatccaggaggatgtgtgcagattatatgcaaagctgcgtcattttgtatcagggacttgatcgttgcggattttggtgtcctgagggattcctgcaaccggttgtccactgatctcaaaggatgatggtagttaatttgtgtgtgtgtttgcatgtgtatgcgtgtgtgtgtgtgtgtgtctgctttcgtaacgagtaactaaaacctatttatttaacaaaaatccccaatacagttttatgaactctaggcctcatgttaatacatgaggtctacattagacctctaaacttgttcatcctctgtatctgctattttgtatcttttgacctccatctcttcatttgggcctccctccacctcggctctgataaccattgtttgattaaatgcatacctgacctttttaaaaagagtccacatataaaatcatgcaacatttttctctctgtgcctggcgtatttcacttaacataatgtcctccaggtcacttcgtgttgtggcaaatggcagggtctcaggaagggtttctctttcatctgaggtcgacatttccttcatcctttttttttttttttaatctgacttattcttgcctacttgaattgcagattagtatagtgtcacatagcatgccgcatcatgagcatatcagaatatcacatttaatgtataagaacttaatccagtaaaacaaataaggtctcatttgctatttacgagtgagcatgtatgtgctaagtaactgtggagcaggagacagaatgtgcgcgttcttcagctgcggaatacctctcataacagacggccctaaatgcgcttctggcgtctccagacatgaaaaattcaaatggtctaatttagctgcgtcagcgtgagaaatttaaaatgttgaaatgttacctactttgtaccatactctactttattcctagattaaagaaaaaaatagaggctgggcacggtggctcacacctataatcccattcctttgggagacaaaggtgggaggattgctagaagtcaggagtttgagaccagcctgggcaacaaagcaagacctcgtttctactaaaaaaaaatttttttaactaattagttggtgtatgcctgtggtctcagtactcaggaggctgaggtggaacttaagcccaggagttcaaggctgcattgagctttgattgcaacactgcactccagcttgggcaacagagtaaaaccccatctcttaattaaaaaataaaaatccaataagaagaaaatagagcttgctttcttcaattattgagtgacttctcaacctagtataactaacaggaagaaaagtctttttgatgcctactgatgtcagttttcagaaccctgaaaggaatccaggggtttaaagtcccctctctcaaatggtttgtggggtttagttaagacgtaatttgtggaatctattgggagattacatttccttcaggagagaagaacaactatctaggagttcaagttgtccaaggatttggccaactgcctttgggaataatgagtttcctgttcctgaaattatccgaaatgtgccggttcagcatgtttccaagttgttttccacagtgatagacaggatggataaacactcaaaagcacagcagactcccatgggcactgtcggaagtttgcagcaatcttgacacgcccagtattactcgatccctgcctcacttaaggcgaatattggaatgagagggagaggatggcgtggcattgaatctactcacattcatatataaaaagtaaattagagaactgtaattgttattaaattacaaacaacaaaataggtaactgagtattgcagtcaccagtgtgaatgactggaggtgttgtctgctgacctcatggcctgccattgctgtgaggggcatggcaccagacgagtgataggactaggtagcttttctctttctccctccctgccccgccgccacccccacttcttctcttctgttgtctctttttttctgagacagtatctgtcacccaggctggaatgcagtggtgggatcatagcttaccacagcctcaatctcctgggctcaagggatcctcctgcatcagccttagcccccctgggtagctgagactaaaggcacatgccaccatgcccagcgaatttttaaagtttttgtttgtttgtttgtttttttatagaaaatgggtgtcactttgttgatcaggcctgtcttgaactcctggcatcaagtgatcctcctgcctcagcctcccaaagagctgggatcacaggtgcaagccactgtgcccaacccttttcactttcttaaccctgagattttgattctgtcatgaccaaaatttcacaaggaaaattgtcttaatgattcgcctctcttctgaaattttttagtattatgattcattaatagtatgacttgatgctaaatgtccaaaacattgtttaataaaatcagttgaagagtatacactgggactcttaaactccttttaaaaattatctggatataatctcttatgctgtgtaattataagttgtacttcttatctcataactttaaatactcaattcaagcagaaccattttcagaatcaaagtcctattgaaaatgtaaacattagacttcttgaaaaaatatatacatggcagatctactgtggttgaaattaaatgacaagagtgtcaccagtaatgcggtttctgttattgcacgggttccacaggtgtaaaaataacccttactagcaccctgttttactagctggacacttgccgaaatggtcaggaacacaaaagtgaagcagctgtgtatcggacagctgtggacaagatgtccataagcagtgctataaggacccaccaaagcacaacttcagatgacttggcagggcggtgacatgctgggaagcaacagtcatgggctgtgcattttcacagaagtgttcaaggaactccagggtaatttacaaatggccactttgccatatgcctgagacactggaaagatttttagtgggtggcatcctatagaccagggattgttttgatgccagggagctcgagctgatactggacattggaaggtgtgtcaggttttctgatagacaaattatgtttcactaatagaatgttttgtttgaggtagggaatatttttaagaggacaaggaaagccaataggtatatttttaaaaattatgaacatatatgtataagaaacagtataatgaaacaagcgcattacaaagaataatgataaaacacattgtgtgttagcttttggcagaaggaatataagcttaaaagttttttaaacaactttctttggcaaaagaagtagaggcagtggcaatcaaagaaaaaataagggattcagacaaagcgtacctagtattaactgttagtaccacagatactaatgctggtttttaattaaaacgacccaatcagtaatgtctttgagattgcctaaatttacattttgctctcaagtatttttaagtcataaaacagcaagccagtggggaaaataaactgaaagatggtttgccacaggcctgaaactgtgagtggggaagttggcatactaaattgtaatacagacagatgtgaggtaatgcatttaagggggggaaaaagactacattctacacacaaagtaatgggctccaggcttcttgtgagtatttcagataggaatcattcagtttctaatgggtatttggccgatgtggtgcttattgtagccaggaacgttccgggcaaggaagcgctgggcgattccaggagagatataaagaaaatatttcaagatctgacacactttgaattgtgtgtgtgtgtgtgtgtgtgtgtgtgtgtgtgtgtgtgaactgcttggtaggaaagctacaagagagactgggaaaggctaagggaggggcgactgaaagaggtaccaaaccatgagaagaaattacagtcaggagggacgctgcagtctggaaagatgaagctgtgattaaaaaccatgataaacacgtgctcaacagacttctttatcaaaccctgcagaagggaacagaagaaagcagttgctgcttgagggggaaagttaatggaagaagaaaataacttgttttcgacagttgacaaagcagtttcacctttgtcatctcacctgacctgtacccagcactgaggagaaggctggggacaagtcattattcacatttgacagatgagcaaacagatcagagtaagtgactcggctaagtccacactgtcagctctgcggtcaggatcaaacctggctctgactcaggtccccttgcacttggcccacctctgagttgcgaaaacttggggtctgtaccacagcatggaagacttaggatcactgtgaaaaactgtgacttaagatcacagtgaaaaacggcaaatgcaaatactgttaaagccttgactcggtggtatgagcagaactcataagagttgagtcagagagcagtccaggtgtcttcagctcagatagctgcccttgctagagaggctgctggttgaacagtaatttatcagcttgatccaacataaagtttcttcatttttatttatactgtactgtcgtgtcagctgtttttgttgttgttgttgttgttgttgtttttctttttcttttctttttggcttcagaaatggcctcagctacgcaaaaataaagaaggatctgaaagatcagtcttgttgtaaagaagacagcaggtgacatggtagatgaccgcacattgttcattcccaaggtcatgggtagtgccaggattttcagacgcaaatgatgcatatgtaaagatgactggaccatctgtgtctcttcagatcctgttgcaattaccaagtgttcccagcaagggttaatgtggtgtgtgaacctgactaacctcaggttctagttctccctccctgagtagagagtctaggagccaagttcagactggctcagtctggaggaattcacaagtgaggcaggtttaatggaagaacagatactctgaggttttggagggcctgtgatgtgcttgtcagcgggttcctgcttctgccacccccaccacggagcaccaaccatgtggtttgttctttgtgtactttgttagctaaactctcaagtgtcaagttgatggcactttttttttaggttcatggacactgttactgtccaataatttgtaagtcagcaatgctttgttttatcagtaaaataaaacactatattaggaatagcatgatcagaacagggtggtttcctaatttttagattgctggccttttctagaaaataaaggcaaggtgtgcatacttgaggtttgagggctaccattgcctcctggcagaggaaatgagtaggcctgatagttgctaggttaaaaagaaacagtagttgaaatactgagaaaagtttaatgaaaagtaactttggctcttaagtagaacagtttgaggacagtgaaaaattcagtagctaagggttgtgtgctctctacacagggatggtgtgtggatttgtggataaggtatgcaacagagtactcctctttgagcatttttatatcttgaattaactatagcacaggagttggcagactatggcttgtgggccagatctggcccgctgcttgtttttgtgtggccacgaactaaggatagtttttacgtatgtacaaaaaaaaaaatggttttctaaaaaagtatttcataatgtgaaaattctatgaaattcaaatttcagtgtctgtagataagtttgattggaacagagccacactcatttgtttgccagtttgtagctgctcaaacagcagaggtgagtcattgtgacagagactgtgtggcccgcagagcctagaattatttactgtctaacccttgcagggaaagttagtcagtttctgctacagtaaaatattgctggtagctgaaattaggagttttcacctcttttcctgcgttttattttttaattttaatttaattttatttattttatttttttttagaaatagggtcttgctctgtcacacaggctagagtacagtggcgccatcatggctcaatgcagcctctaccccccaggctcaaggcatcctcctacctcagcctcttgagtatgtgggaccacaggtgcatgccaccacacctggctaatttttaaaattttttgaagagacaaggtctcactgtgttgccaaggctggtctcaaactctgaaacttaaacagtcctcctgcctgggcctctcaaggtgatgggattacaggcatgagccactgtgtctggctgagaagccaggtcttgagaagccaggtggctcagaaggcctagctgacagtgtaggggagacagaggtcccctccaacctccctttagctcttagtgggctcttcagctggatctagaagtcaggttgacatcaggcagattaataggagaaaggaatacaaattttcttagtgttacttgcacctgggaatctttaaaagagtgaaatccaaaggaattggccaaagcaagacacttttatgctgagaacgatacatttgagaagaaatgacaagaaaaaatctggggcagtacatttctaggggagtcactgggaggatacatggggagtataaaacaggtagaagataagggctacttccagaaatttccttattcaggttagttgcatcttccaaaccctagtctctgggataagggctattttctcgcctgaataggtgaggggcccctcccaaaggaatctttgtggcttgctacatgcaggaagacccaggtcacctggcttgttggggtcaagttggaatctacaactttttcagtgttttcagctcacactaatcaatataaaaatccggcatattttgggatggcatgtccttcactctttgaacaacatcaccaagacctcaatacatgtgtagggtcaccttggatcaccagccctcgctgagctgtcgcaggaacacaatgttgagcctccttgagttcttgacccatgtcattatgagccaataaaatggcagtggttttaagccatgaagttttggggtgttttttacgcagtgttacttaactgaaaaggactagggatgatgtatgctagcctttttattgtcattcatgacagagggaaaataccctctcatccaggatgttagtaaagaatgtagttaaatccttctgccacttgagttcctggtacgtgtggctcatctaagacattaaatgctatttttatgattataaaaacaatgcatgcttattggagaagatttagaaaaggatagaaaattctaaagcacaatatttaaattactcataattcggccatctaaagataatcacgattaataccagccttttctttaaaaatatattcttgttttataaaatttatttatagttttgtactctgctttattcgtgtagtaaacaagcatatttcaaaaacataatttttaatgaccacagcagcccatttaagtggatttaaaaatccacataattcaaaagtagtgcatggtcttcattttttgtttctaggtttgctagagtatttttttttaaaggaatcctttttaaagacagctttattgagatataattcacatatgatataaagtgtacaattcaaataccatttagaatatgcaattcattgctttttagtatatttactaaaatgtatatatttttatatactatttaaatataggggttgtataaccattctcaatctaatcttagaacattttcatcctctctaaaagaaacctaaaccttatttcccccaacccctacccccagccctaggcaaccactaatctgcttcctgtctctgtagatttgtatgtgggcttttgtgactggctttgttcatttggcataaggtttccaaggttcatccacattgtaccttgtaacaatacttaattcctttttatgggggtcaaggcatattctattgtgtggatagaccacattttgtttatcctttcacccattaatggacctttggattgtgttcatgttttggctattacgaataatgctgctatgaacatttgtgtagaagtttttgtgtggacccatgtttttatttttcctgggtacatacctagtagtgaaattgttgggttatatggtacctctgtgtttaattttctgaggaatggccaaagcaactgtataattttacattcttactagcaatgtatgaagtttctaatttcactgcatccatgccaatacttgatattgtctgtccttcttcttatagccatcctagtaggtatgaaagagtagtatctcattgtggttttgattcacatgttccaaaggactgatgatattgaggaggtatccatatacttattggccatttttgtatcttctggagaaatagctattcagatattttgcccattttttaattaggttgtctttttattgaattgtaagagttctgtatatattttgagtaaaagtcacttgtcagatttgcaaatattttctctcattttattagttttcttttcactttgatagtattgtttgcagcattaggtgtaaattttgatatagtccacttcctctagtttgttgcttctgccgttggtgtcacatccaagaaaccattgcctaacacaagtcacaaagattttagagaattttttaaatgttattttattcatttatcttacactttatagctcattctgctgtatttttaaaaaggcagatccttcaaggacaatacatagggaacacattctttttcatagctgtctaatactctaggtataagtagaccttaatgtattcaaccatttcctattgatagacataacctatttccagttttttgggttttgccacaaataagactgcaaaactgtgtacatttattattttgttctggtgtctttattcctaaaggatacattacctagggcggaatgggaagcttccttcggaatctaagtaccaagatttgtctgacattagaatttgagcactccagtctgctggctaggaaaaaaataggaatctgctggagaagagttttcatcacagcaaactcatttcataaagctgggttgccttcacattctgttgctctttcaacagcttatttttatttatttatttatttattttttactgtcttcaaggaagtaaaacagacttttccccatagaacgacaaaggaaagaaatgcagaaaggtttgggaaatagccactaagaaaagtatgccggtgttcattctcagtcttgtatttggagtgtgtgtgtatgtatgtgtgttctctttatcatgcactgctaaaaagaattcagggaccacatgaagacacgcacatgtgtggtgccgtatctgctggtgtatgaacctaatgggatcaccgagaaagtggaaccctcctggctctgctctggtccctggtatctcatttctgttgttgaaaggggggttggcaggggtaacactgagaagacaattgtgacaaaatagagattttttttttaaagtccagcaattaaaattgaacataatttttatatcattcattcctcatggtttaaaaggagtgaaaaatgtacaggagctttaactgatgtctgctctgtaaaatctgtgttaatgtgattaatggtcagctattcatttagaggagccaaagtagcagatgagtgttttcgtatttttagattctttttaagagcccttagtggcctattatatcgactcttccttagaccacacgcagcctccctttagcaaatctccgaattgttactttcatttaaacttcagctagaaggccactttaggaccttactgactgattgagatgctagattatattttagctgcatcttagaaacattttctgatggtttgaagaatctgtgttactgcttgccatgaactaagtaagctaagtgaatagtttgtaggaaactgacaagtggaagtggttttgaggatttatttttttcttgtacctttttattgagggaaacttaaaacatttcaaaagtagagggaatacgcatgaacccatcactcagtttccacattcatcctctcagagctcattctgtttcatcattctgcaggatcccacatgcagccacgagccacgtgtggctgctgaatgcttgccttgtggctatctgcagggagttgtgccccagtgtaaaatgcagcctgagagcctgttccagcagcctactccctcttggggtctcctcataactaagcagaccctcgcgctagccctatctctgtgtaagcccctcctttctttcctttaaaacactttgaaagtgccactgtttaattatttggcgtgcccattaagtctcagtctgattccctatgataatacagtctccagaaggggtagggcctggtgtggaatcggtgcccggagtgcacccagtgaatgagcacaccccagtaggaattctcaaccccagctgggcccaataccttctttgccaggtgatgcaaacatgtacatgcaaaacatgtacatggtaacctcctttaataacttgatatgaaattcacagatgatagctcttaaaaaatgaatataatgtcctaagtataacaggaaagagaaatataaggaaagtaatttgcaataaaatcatgctttttcttctcctatttctagtattggtggcacagattgtaccagactaacctactagcaggtaataaatattgtaagcctcttaggcaaaacagcatctcccagtattcagctcttgccatccctctgagctaagcctttctcccctgtggcacttagtactgagtgacattctggttttttaattgttggcttcctcctctgctaagaagctccatgagggaaaggaatgttttctgtttcattcagctctgtatcctcagcacccagaacagtgcctggactatagcagttgcccagttaagcagatgtaccttttacttcttgttctctgattcatcagcaggaagagcctatgaaaggtctcccttatcagcccatcactgagccagatattccctctggttagtctcttgcccttgttcctctctgctggatgagatgatgtagcagctgaagactctccacctataactgtatcgtgccacattcagatttttagaatgcccctcttgatctggccatatctacattaaatgctattttcttcaagcagtgagacaaagctgagagacgataggtttaaagattggttacaaattctgatgaagactggtccttgaagtctttgggctgttacatggccctttggaagcaataggtcatcactgtgaacaacttctgtaggtactggtttccatacgaagggaatacatcttgatgactttacatgaagtcttaactttatttgctgtttaatgtaagttggtcaagggtcttattgagcagaagaaacttgggaaatgaaagcactgttactgggaccacagtttttgagcctctgctgtcaatggaaacagacacttcaaaaatgctctccacggaggctcagagagatgaaaagacaggaaaaggagccgaaaagatgaaaagacaggaaagaaaagacaaaaaggaaaaggagctccatgtgccatcatggagcacagggacaaagaaatggcaacagtgtgtctgtttccctgttaatggttgttgagaaatactagccacagtttccaaagtatttaaggaataggaaatgtgcaataaattatgtgatttttttgtggatcagtttccttcttccaagtcgggaaatgtcagagaaacactgtgttgttcaaggatgacagccaggaactagtcaggcttcagcacctcctgccattgaccctcttctctgagcattatgtagagtggatgtgagggctcattcatggactgtgtcaggagaattgtactacattgatcatttaagggaaccattctgcttgttcaggagagtcttttcattacttataatggcttgtttattgacatttcttatttactgtttctcctcaacagtgtttttgtttgtttgttttttgagacggagtctcactctgttgctcacgctggagtgcagtggtgcaatcttggctcactgactgcaacctccacctcccgggttcaagcgattctcctgcctcagcctcctgagtagctgggattacaggcacacgacaccatgttcggctaatttttgtatttttagtagagatggggtttcaccatgttggtcaggctggtctcaaactcctgatttcgtgatctgcccacctcggcctcccaaagtgctgggattacaggtgtgagccaccgtgcctggcttctcctcaacaatgttctaagagataaagcaaaagtatcaggtaatatgtcattgtaatggtacctgggatagaagaatttcatttgcttgctactatctccactcttacatgaatacaaatgttcccaatttttagtcaatgtaccaatcaacattgaatgaatgatatgtaaattacaagaatgaagggccagaaagatgtcacgtatcagtgatgactgttctgagctgtgccctcttaaagcaataaagtaagttctctttgattaatagttacgttggctaccttttagctgcccatgaaaaatatagatggacttttttttgttttttaaagacagaatcctacggtcttgttttgttgcccaagctggagtacagtggcatgatgatagctcactgcagcctcaaactcctgggcttaagcaatcttcctgcctcagcctgctgagtagctacgaccataggcacaccaccactcctggctgggttttatttatttatttatttatttatttattttttggtagagactgagtcttgcaatattgcctggactggtcctgaaatcttggcctcaagcatcctcccacgtttagcctcccaaagtgctgggattacaggcatgaatcactgtgcctggctggaaatttcttagtaaaacaaaattcgttagtggttcaaatatattttcagtgctataaagaatataacatttctacctattgtcagctaaagctaagagttaaagaactacacctaacatagtgactggcataaagtagatgtacaataagtatttgctgaatgtgtaactggatggctggaattaactttgagtaggagaaacagctggtctggtcttctttttttttttttttttttttttgctcccaagtgtcttgtctcttgtctcttctctgatcaccacagcatggttcttaggagtcacagtgtctggtatatacggaaagagtgtttttggagggagaattcaccaaaagaacatgatacaagccaaaaggggttattattagagaagaacagtgttgatatgaaggctagttaatgctttgtgaatacccaccatgcacaagacagtgtctgctggttgctggaagtccaagatgatcagtttgtgtccctgtggctaaatgtttggttgttagtctgcatgaaatagatatgacaccaaattagaaataggagaaagcagcagaagaaaagcaaaggttctgtgtataaccaagacaatggggttaaaaaaacacacacacattgctgaagaaagtaagttaagtaagttgagctttcatttgcaaaatgactttttatttggctgtaatattcctctgggatggctctgtgaattcagtaaaacaaagctaaagaaaaacctattctgtttgagggaccgtataattaaccatagaaatgagtgccatccagtgtattactgaagaaaaaggattaaatagtggtatgaataaaaatagtatccctttttattctctctaggctaaaattataaggactgtcagtcattttgttaagggtctagtttattattggctgtgttgggaatagtgctttctatcttcctattatgtaatagtccacaattacatgaatagtgggatttttattttttttattttttattttttttcctcagaagagcctggtgttgaggggctgcaggagcagaacaggaagttatggttgttttggaattgtgtgtggtgtatgtttaaattgtattagaataatttttattctttttaaactgtctttctggttgtctcatgctactttgagtttaatataccctgggcttgatgcaagaccccgggccagggccagagcacctggttctagttctaggtctacctttgactgttgtggtcattttaattaattcatgcatacatatttattgcattttcctgcactgagtcctgcgcatacaaaaatgaataaaacccagttccttcctgtaaggaatcagtttagttggaggatcacagagataagcataattataagacagcttagagatgtatatggagtattttgtgatgtaagggaaggaacccaaaccatccttggcaggaagtaatgggaaagacttcctggaggaggtgatgcctgaattaggtagaagtcataaccatggggatcaggggctttgtagggcattctggctagaggttatcaaatagcaaggcagatagaccccaagtgtgttcagagcactcacctgtccaggaagtggccctggacagggagacaggaaatgaggctgcaggaatgagagagatcactggatctccgtttccttacctagaagtgaagctctgttaatactagaaggcttctcaggaactcactcattttctggaaagctttcatattgctgcttgttggagaatgacatgttaacctgctgctcacctttttaggacgttgagggctgggtattaactgtcttgagtttggcagtattttgaagaaggacatcctaaattacggttggtgtgactcatgtgagttatcagatttgtatctgttggtctttttctctgcgtctgtctggttgtccaggcgtttgtgcttctccaccccttcttaataggcccttctggaattgatctctgcatccatctcctctggacgtaaatattcatttctcttttctctgacccttcaccagctcccatgccctttgtgtgcagatgccccacagatctggctgggttttccctatccctgtatatattcacaagtacacctgtgacattcaagtattgtaatttaaaaatcagcattagcaagaaatatgcacatatcagaaactgaagtgggcgtgttatccagattaaatcactatagacaaatctctttatccatttttttaattctttggaagtggttatgaaggtgtgaatagttcattgttcaaggacagtgcattggattctgttttttaatctcatccgcctccaacaatccccccccacactgtccccccgacccagagctgtcagggcagccagagggaaccttgttttcaggatgctgatgctgatatattattcatgatgtagcggcattaaatgtgttagatagctggcctcctttttttcatttaacaataactgcctattgtacatcggtctttttctgtagtaggataagaattacaaagagtctttggaggaagaaccagtgcttcaggttatgatataccttatattgtttttgttgttaggggctatatgtaaaatatagctgcatatttgtctaatagctttgacttagactgaaacattggttgccaaaaacaaattatttcacattaacaaatattatattattagttattttaataatttattcctctcagtgggtgctagtccagacattttttgtgtttcttagtggtaatgggcctgtctacttcatgaaagaacaacagcgtctctgcatttcgctagaaaaatattcttggaggagagtcctagaccacgtgtgtgtgtgtgtgtgtgtgtgtgtgtgtattttccaagtaaatcagaaaattcaggcaattaatagtgaaaactgtcttctcagtaaccttttcttcaagtcttaacataaatgacatttctttgagagggccccctagatctggttgtacccctttgcctcccagcatcctgtgttctcttacaatgcccctaatgactcgcacagcctcggagctccatgtggcccatgtggcaggacccaggtgggcagtcttgtttatcgcagtgccaggcatcaggctgccaccttccagcgacctaccctaggagtgtgattctgaggattcagtgaaacggtttaggcaaactcctcggagcagtggctgaccagagcaagtcattaataagtgccagctctttttaaaaattcatcaggtgtactctctccacccagaagagactagtagtttaggcttaccaggtctttcttcccacttctttctctgcattgttatttattcatatttctttctataatggtttattgccaaaggcagtcaatagtatgttgaattagctatttctataatattttagactgatatatgtgtgtgtatatataaatatatgtaaaggtatatatatatgtgtggacgtgggtgtgtgaattatatgtatataatatatgttcgctttccctggcttttcactaagaaacatgaggatttaccacagtgtctcttgggtactcagtgaagggaaaggcatttacatcatagccagtagttactggatgcccgatgggatgatgccaatatgatgactgcttctctgctctttcttctctgagccaatttattccaggaactttgtgctcactgcagctgtgactataattgcaatcaaattatagtttctagtgtcacacttacatttgccgttttttaaaaaaagctagaattacgttactgtccatagcaggaatttttagtgcaaagagataatcaagtgtttgtaatgattcatatcaactggttgtaatatgtgaaaaggctacagtatttttaaatatttctagggtgtgtggtgaactgtttttgaatactatggagaaatatataagtttttactaaattagctttaaaattatgtaaataacatattatggaaaatgcagacgatatgggtgagacaaaatttttgaaattactattattaattgcactattagcccctggaatcgattttgatgccctgtacgtatgcaataaagaattgccgagtaagagggtgaataaatgaacccctgtctttgtagtgaacaccccatagaaggaaggtcacagctgtttgcatatggaagaagtttgtcagtcaggtggaccttaaggagtgtgttggctatcatactgttttgtttttggttttgttttttgcccaggctggagtacagtggtgccataacggctcactgcagcctcaacttcctgggctcaagcgatcctcccacctcagcctcccaagtaggtgggactacaggggcgcaccaccatgcctgactaatttttgtagtttttgtagagatgggatttcaccatgttgcccaggctagtcttaaacttctgggctcaagtgaccctcctgcattggcctcccaaagttctgggattacaggcttgagccacaacacctggcctgtcatactttttagttgtcagaatgagttgtaaattacatgtggtatgattattaagactgcaattaatggaagcactaagaaacacaataggtcatggtagcctggggctctaatttatgtatgcatcatgctgaggtcccataatgtccagatgaggtgctctgcttctagtggctggcccagcctggctttctgtaatcatggtcagcttgtgaactaacaggtcatagtcattcattttcactgagattctgcaaataaacaaatatgcagactagaaatcagaaagacattcatattttttgctagcaaaaaacggttggtaaaaaagtgattgcacaaagtcttccaagctccactgccccattgcctgcacctggaacttggcaagtcgcagaccgtctgtatcctgcatccgtggtgtcctctgagtgtgcatggcctctccagtgggcacgcccgcaataaacccggtgtccatagcctcagctgcattaccctacagggtttgctgtcttgactctgtggagaggacttagtggggagaagtgctccttttccttctttctttcatagcttggtttttgcttctgacagttttgttgttttttgtttgtttgtttttgtttttttcatttatgcatagtcatgtgttgcttaatgatagggatatgttctgagaaatgtgttgttaggcgattacgttgttgtgtgaacattacagagtgtactcacatgaccctaggtggtgttgcctgccccacacctataatcttatggcaccaccgtcgtgtataggctgtgtccttgactgcagtgtcgttatgcggctcataactatacatacctttccttctttccttttttgatcttcggtctcttctaatttcctttttactcattctctttgtgagccaaaaatctcccctcattatagttgcaaagcatatggctagtactgtgacacttccctatcaaaggatttcagagccacattatttttgaagcaaagtgagacttgtgaatgtagtgttcttagtccccagagctcttgaaaactccatagacatgttcaaattatcaactagcaacaaaaaaagagtattaaaaccaggagtgttttattaaaaatgaaatgtattaaaacagaaaattgagctaacagaaacaaaacatgaagaaacatccccaaagtttactgttaaattatcttatttggtattttttctttacaaaaacagcccaaaccatgttttgcttgaagcatcaggcttcaagagaagtacatgtttcttatataaattcccattcgtgttttgtttggtttaatatctactgttgctagtagactgtgtattggaaaggaatattttctagtattttctgcattgatccacatgcatagtatttcatttacattgtgggccatatagaattttgcagactagttcagaaaaccagcttctatttataacattgaattttcaggaaaatgcattctgagttccaaataatgagcttagagctttacttttgaaatacagcccaattgtatgttgagagctgcctaccctgtaagccaatgaagggtttttattttgtatgatatttcaatatgatccagaagcatctggtttatctagcataccattaaaaaacaaacaaacaaaaaaaacactgtgctacttagccaggagaggtcttagttttgctttgacttcagcccattgtctttttagttggtgatagtctgtgatgaaaaggcctactgggaaacgttgagagaatcttttaaaattttaatgcagggaattttaaagaccagtttaaaaaatactacttaagattgggcgtggtggctcacgcctgtaatcctagcactttgggaggccaaggcaggcggatcacgaggtcaggagttcaagaccagcctggccaacatagtaaaacgctgtctctactaaaaatacaaaaatcagctgggattggtagcacgcgcctatagtcccagctactcaggaggctaaggcaggtgaattgcttgaacctgggaggcggaggttgcagtgagccgagaccatgccattacagtccagcctgggtgatagagtgagactctgtctgtctttctgtctgtctctctctctgtctccctccctccccctctctacacacacacacacacacacacacacacacaacagaagttcactgaaaacttcaggattttctgtggctaagagtcctttcaatcatgaaagtattatttacttctaaaactttttggaggacttttaaaattgttacaaagtttttttcaaaatcctctttttacaagtattagtttctgggaaaagctggaagacatctattttctagttaaaaaataaaggcaaaggattcattttctaagagaattttaattttataacctcccagattaatgtcttggtgtataaatgtgtatctcatggaatgtgacatgagaagcacgtcatttgttaggtgctaaatttgtttttacgattatcgattttataagtgatcttcagtttgttgaagaatgagtaaaaccacatagatattactttcccactttaatcttttggatgaaagcaacacattcaaagccaaaggacttagagtgaaatcttaaggtgtttgctaccataattctaatttggtattcataaaaaaattatgtaatatttcaagacttaacgtgctctgtttgaatacacacatcaaaactctgtggttgctttcttttttccacttgagaaactaaattaatttaaagctagtttgtggaatataattgaacactagttattttaatttccttgctacttgatcaagatcttgctcttttaagcatcatgtgaaaccgttagtacccactttcacctggcaaaataaggcattttacatgatcagggcaaatatttttctgactctgatgaaggacttctgtgccagtcaacacattattatttttacaaagttatagtctgtgagttggaaatgtgggtatttttttctttccatgttatttgctatagttattaatattaattggaaagtgattgttattaagcaggtagtgaatagattcacctgccctttttacatgtgcctcatagaatggcatcggccaatgattaactttcttgcagagatgtggatgttggttgttctgatgctatattggtatattattcctatcggtataggactattaaaaactttctacaaatgtaatgggaaaatgtacgttcggggagcaaaggggtagtagggcttatcaaatgcaagtgactactgggagagtgctgtttcagatgaagcctgcagaaagaaaaaaagaaatgtaggtgccggaaacagtgcagggagaacttaagaagaaccgcagttggggtttgtgcaggctgaagaaagcatttgatgataagccagctgcaggatgttgacacaggggctgtgttagcctgggtgtttggaattgccttctgagtagaattttagagctgttccttggttctacttaagtatttgataatatcttttgggatcgataatttttcaaaacaggcttcctaaattaatgccttcctgctgcataaaaagctgttccttttctttggtagattgggaaaagagcattgaaaggtcatggtttctcccgtgacttttatatgagggtacgtttttctccccctggagtttagatggccatcataaaaactggttgataatcagtaagttatacaatatactttaaaggcattgtagctctcaacatttctcagatatttattttgaaattcatggtggaagaatttgtgtaatgtattcttttctgtgtttccctatgtaatattggtaaaagcattattgggaaacaaggagagtaatgaaagtagcatcaaaacttattggagttaggggaaaataattaaaatgtgttgtattagattttttcctaaagataggtggcaaggcaacctttccttggtcaagtttattagaaacctatttcagacattgtagagaatgttgtatgtttatatagcattcctggaaagccatctgaaaatagtaatcaaaattaatatatatggcctttgatctcacagtcccacttctgataatctatcccatagaactaaaagtactgattagtaaaactgtgtgtgtgtatatatatgtatatatatgtatgtgtctgtgtgtgtatgtatatatatgtgtatgtctatatatataaatatatttatagcatcatagtatattgcatctaaacattggaaacaggccaggtgcagtggtctcacatctgtaatcccagcactttgggaggccaaggtgggaggattgcttgagcccaagagtttgagaccagtgtgggcaacatagtgagacaccattacttttttcttaaaaaaaaaaaaaaaaaaaaagccaggtgtggtggtgcacctctgtagtttcaactacttgggaggctgaggcaggaggatctcttgagcccaggaggttgaggctgcaatgagccatgatagtgccactgtactccagcacgggtgacagagtgagaccctgtctcaaaagatacaatggaaacaaagtgaatgaccttcagtagtggaacagctaaataaattatagtgcgttcactctctgaagtaatataattaaaagtgagctagaccagttgtgtaggagggatctgtatgatgtagtttaggaaaaggcacattcagagaaatatatgtaataggatttcatatttttaaaacgcaaagcatttctcttgttgcttttgtcatcacacataccaaccaagctgcgcaccttggcttgttaaggcttgaaagtcacaggttggttagagggaaaaaagtaaagtgatgaagacagacatcatagagccagtttttcatttatgtaaaaatgtatgtgtgtgtgtttgtatatgaatgtattaaatatatccataaagatatgtatacaaaaatcaaaatattgtggttatcttgggtattgctattacaataatgttatgtttttttccttatttttctctatttgaatttttttcaaggatcctgtgtttatataatgtgaaaggaaaataaaacttttcatggagtgggggacaaaagaacaatgatgtccagttttccattttgtgttattagtattctaatataaacctcaaagttttaatgaaatctgctaattcacccaaacagagttctcactttcaaatgtaatatattttaagacctagaagatgtctgtggctctgtggtagtacttcgtactgaaagcatacagctaaatgtttcttttatgttgaaactctaggacattatttattagcattaaaaaataaaagtaaaacattttggattgtagaatttttgtttaaaagcatgtatataccaaatagaaaacaaagggcttaaagactaatagatttaaccacataagagcgaaaacttcttttatcaatgcttatcataagtaagatcaaaagaaaaaaatggagaaaaattggcaagcataaaggcatactattgtgtgtgatcaccaagaaaaagtaattctgtagaaaatggaattaaaaaaaccatgaagaggaaaaaccacagataaaaaatataaatagccaggaaacataaatatgttcagtcacagtagttatccatgtaaattaaaacaacagttacacattgctgatgagaatgtaatttaatagtctttctgaacaatagttcgtgtatgtgtgtatgtgtgtgtatatatatgtgtgtgtgtgtgtgtgtgtgtgtgtatatatatatgtatatatatatatgtatatatatatgtatatatatatatgtatatatatatgtatatatatatatgtatatatatatacgtatatatatatatgtatatatacatatgtatatatatatatatgtatatatatggagagagagagagagccttaagtgggcatacccctgaccctagtaattcttcctctaggaatttattatgatttagctaattaggaatgtctttttagaagaatgtatatacagtgatatttatcatgcaactctgttgataatggccaaaatggggggaaaattgtgaatgcacaacagtgagattaaatgatggtgtagttacacaattgagtcctatgtcattacaaatcatgtgactgtgtatttatgtggaatattaatgtagaattaatttgcaaaatagtatgtttagtgtgctttccgcttttataaaaatatttatggaacactgtatagaaaaatgtctagaagaatatatatcaaaaacatttatagtgactatccctagatgatagtcagtgatttttattttttctcttcgtattcttttagctttctgatataagccccaaacttttaatgaaatatgctacctacatacatttgtcagtttacaaatataatatataatttgttctttctgcaatgaacatgtgttacttttataattagaaaaaagttgaattggctttgttcatttgagatattaagaaaaagccaaacaaccaaccatatggaaattatacacaaaagatttctccaaagttagaggaagaggagaatcaaggtagtgaacatttattaggctctaattgtatgccagttcttggcatacattatttcaactaagcctcgatttactaccttagcaaatatatatcagatacctcttcctatgttacagtcacaacaaagagtcatttatgcagaaaaagaaatagtctcagagacgtgacctttgagatcacacagctagttaagtggaaagccaagaatttaaatacagctggaattgtcaggatcctctcagtttactgctgacactaagctcaaatgactgatgtaccagaggtcaccatactgtcactaggagtggcagagcccaaaagaatgtgcatctaattccagatttttggattcatcagttgcctcctctttctcctcaccctggggcgacacacaccagacgttgcagaactgtgtgggggctgcattgctgcattaccccatgtagatgtgtgcatatctctgtaagcccaggcttggagttctcttactttcccctagcttggctacattatcagattttatgggaagggacaatttgtatcatagtctttgggtgtcctcaccattgtggcggggggagttttagttaattccttgcccctgtggtgtctctagatatactgtgctagtatatttctccattttctggtgagtgcctgtgagttttttcaaccattcaagcagtcatcgggctaaaagtttcttttatattactttactcagcaaataagcttttaagctagctcaagagtatctttttctcccagataaacagtgatgtaccctgtatattaaagggcaaagctgaacactgaaggcaagtacccttaattatgtgcaaaacgttttcaatcaaatctattgtcatacgcacaaatatcaaatttagaggttggcctttggaaaactcacagcacaacatttcagaaatcttcagcattcagcagagtctccctgaaatgttacacccaaaccagagagaaaactcttgtgatcttacaaaaggttcttgattctttgaattatatttgggataaaggagaagaagaggagttggagtgtgggaagatagatgtaagtgatggaagaatgcagtctggtggaagaatggggatgcctagattaaacaattggcatttgtaaaaatgaaaatgaagtggaataggagcgtacagaatctggcaaataataggtgatgcaaaattcagtatcaaaaataaagacagcttttcccctctgcttcctgcagtataaatggtgggtacatttttgttttcttgtcattcattccttgcacccaacttttcagagatggatttataataaatgatcaagggtgttgttttgactgttaagatccattttggtatccagctaaattttacagaattcctttcacatcacaatcttgttcctcatgtttcacagtgtttgtctttgctttctctactgagacttgttttctaattttcagcctcttctctctggtccttcatcctagaatttgcatccggtgtttctaacttctgctcagaaaccgtgaaaataatatattcatttaccgattgattcatccaaacaataattgggtacacactacataccaggtatcgggaataaagagcaatgaaaagcaagtcccttgtcctcaaggagcttagtttaacttaaaagtgttctcctatttaaggccagtgagtggctcacaccagtaatcccagcacgttaggaggctgaggcaggagaatcatttgaggccaggaatttgagaccagcctgggcaacaaagtgagacattgtttctacaaaaaaaattttttttaaaacttagcctggcacagtggtgcgtgcctgtggtccagctacccagaagactgaggcaggaggatcacttgagcccaggagttcgaggctgcagtgagctatgactgtgctactgcactccagcccgagcgacagaacaagaccccatctcttaaaaaaaaaaaaaaaaaaaaaaaggcagcatcatcctcacagataggtatagactagtatatacaagtctgaatcaaaaacaagatgaatttggaggataagtgttgctttcatgagaaaactccatctgatcaatgtttaggcacttggagttaacagtggtttttgtcacactgtgctttgcaactgcaaagatgaatacatggtctaagttaaaacatttgactctaacaatgtggattaactgaagtggtgttcactttttaaaaatcagctttatttttagagccattttagtttcacagcaaaactgagtggaaaatatggagagattctgtataactccctgtccccagacacacacaaccgctctcctgttgtcccacacctgagtggcttgtttgttacaattgatgaacctacattgacacgtcgttatcaccgagtctgtaaagtgaccttaaggtttgctcttggtgttacatgttctgtgggttttgacaaatgtatgacaggtatccaccattgtagtttcatataaacttttttttttttgctttaaagtactatacattttcttgagttctagaagtatggtgtattgattatttattgatgtcatagagttaggaggctgtacagattattaaagaaaaatgtaaggaaaggctatatttgaaattaaggttaggttcttggaaaatattagcaagctgaatcaaggtataaatctcatcttttgtgcaaagtgagatagggctgtgcttggtatttgtttaacgggatcctgtgagtcataaagcacatggatcacctagattcttgcatcttctttcctgcctgcctttcaggaaaaaaaaaattcaggattcagtaagcgtttatttattttttatttttttgagatggagtctcactctgtcgcccaggctggagtgcagtggcgtgatctcagctcactgcagtctctgcctcccgggttcaagcagttctcctgcctcagcctcccaagtagctgggattacaggcacgcgcttccacacccggctaattttttatattttagtagaaatggggtttgaccatgttgcccaggctggtctcgaattcctgagctcaggcaatccgcccgccttggtctcccaaagtgctaggattacaggtatgagccaccgtgtccgtcctcagtaagcatttataaacactgattatgcgccaggcacagtagcaaggagtgggtgctggggatgtagggggaagtgagacggttttcatgtctactaggggcccacatctgtgtagcaaggcagaaagtcctggaaacaatcaaagtttgtgggggtggttaaggacacaatgtctgtaccttgcagccaggagggacccagagctctgcttcgcaagacaagtgataaatgacgtttaagctaaattaaagatagccagccctgcctcagtctgaaaacagccctaggaagagattcctgatagacctgccctttaggctattaaatcaaaccctattttttttgttgttgggggtgggaggaggggcgcggagtgggagggttggaatcttgttctgtcgcccaagctggagtgcagtggtgcaatcttggctctctgcaacttccacttccaggttcaagcgattctcctgcctcagcctcccgagtagctgggattacaggcgcctgccaccatgccctgcccccattagcatcttgggggaatcaaaccaagaatctaccaacccttaaggggcaagttcctatcgatctgctctacggagcattaatgtctcaatgaccccagaccttgctaccgtcctcctctcaactcctgtggcacatttaatgaaataatatagaattactcctaagtgtttcatctcatgttattgttattacaggcaccatgcccagctaatttttgtatttttagtagagacggggttttgccatattggctaggccggtctcaaactcctgctcaggtgatccgcccaccttggcctcccaaagtgttgggattacaggcatgagccactgcacccagccaaatcaaagccttttgtctgtagtccttatggtgcttgaatccttttgtggccataaagacgtgttatgagtatattcagtggtatgtgcctaggaaaagaaaaagaaaatgactgaagactgggtaaagctagctttttcctatggaatccaagtgttagccagaaggaaccagggtgcattcagtccaacctgttcatgttatgcagagggacctgaggccagaggggtggtggtttgacaaaccaagattactagtcccaacctcggagccaaggcagacccaagtttcttggattctggtgggggtacattccgcagccttgagctgccccaaggggcctggagatttgcttaggaaccctatggagcccttatcagaaagatgtgtaaagctccaggctttgtcatctgatagtcatgggattgaatatgaccttgtgacctcgggtgagttacgtaacttttctaaactcagttttttcttctataaaatggagacaaaaattcatatccaccaatggaattgctctgcagactttttgagatcatgtatgtaaaatgcctgtgacattcctgggcttaggataactgctggagagatgttcacattctcattcttatgggatcttttgctgcgcagcaaccatatgatcccactggattgatgaaatagagatttggtaaagatctagtctaagaagctttacattttttaaaaaagcaggtatagaatagcttctaattgcagttcttgaattcactgtctccctgtattttgaatgtttggtagtttaagcctattatccttcctgctttactttttaatttatttgtatcagtttaacaggtagtattttaagttctcagattcttacagttatatgaaacattaatataccgtggtccctttctccaccaatacatgtacctcaagtattagagatggtgttattttgtaaagtatttcagttctttccggtaataaccttgcttgttatccaagtatttcttccgtttcagtttatgtcacattcaacacttttagtctccttttgttaactgttaacattttctatagtatttttccaaaatgatttgtattgtggtgtgacattttgatgccacatattcaaagtagagcaaaccttgaaattctactaattctgagaagatcaacaaaggaagtttttaagaaacattttccctgtggggtgagtaaagtattcttgcattttattcatagctgattgcttagaaaaaaattacacgtttctcttcctgtctgtacttctggcgccacatatttctgtagcagtgatctcagtagggtttctagcctgaaaaaaacaggtcccactttctacgtccagctaaaaaatgatttcacaatagcattagtttatatccagaaaaaaaactactagatttgaaatttagcgattgcacccatattaaaaattgatgggatgtttaataacagtgttcttatttactgtctctaattccatgcctgggcaaaatgggtttcagtttttcaagtgggcaggccagctacacttcttgctttttcaagtagtcacatggataaggacacatttccaaaattcaagctatgacatcaagtctttgttttatttggtgaagcatattctttcagaagacatttatatcaaggctaaagactctttggtttaccattgtagaatctaaattggtttcagcctgtttttttcgtgtcaaagcagtgcgtctgtctttgctttggaatagggagttgaaaggcatccttttgaagatccttcaggtgaaaagaaaaatccaaaattgctctaggaagacttgttactgacccacaacagtcaaaaataaaattgaagaagttccttgaaaagacaaattttagtcccttgaaatatggaataccttttgataagggctgatggaagactggtgctttgttcctaaacgtcattcattatcttaagtgctttggggttattcccagctgtctcccatggatgtctggaggtgaaggcatcccattgcagagggaggaaaaagtactgcgttgccaacagagttatctccaccagctgtctggggcggttggtgcttctgagaatgttctgttccaattgtggcctgagtgctacaaagtaagacacagatgtttgatatatcaatcacagtattagatgttggggcagatataaagcaaaataaaatatggccctagagccaaagtgtacattaaatgctgaacactgctcttggccccgttgggaactggaagaggcttcctcaagctcagggagtttagaatctaactggcgaatcatttaggactctattttgaaagtcagttttgaaagtgacataaaataactcaaactgacttgatcagaaagagaacttcaagtataaaaaaaatccaggtgtagttctacctagagtctcatatagtttaccatggcctggctctttcttttttctttgctttttttttttttttgagatggagtctggctcttctcacccaggctggagtgcagtggcacgatctcggctcactgcaacctccgcctcccaggttcaagctattcttctgcctcagcctcctgaatagctgggattacaggtacccgccaccacacccagcaaattttttacttttagtagagatggggtttcaccatgttggcctcaaactcctgacctcaggtgatccacccgcctcagcctcccaaagtgccgggattacaggtgtgaaccaccgtgcctttatttgcacccttgtagcagcaagatggtctcagcagctccagccttaccgtgttcaccactgagtccagcaagacagtgtctcttcccttaacagtggaatgaaagtcttaggcctgactgtccttaccccaaattgggtcatacgtctgtccctgaagcagttgtcgtgtccaggggaatgggaagtgcttattttttttaggcacagttcccctctcccacttctggagctggactgggaattcgagaggggccggtgccccaggtggggacacaggacactaaccagaaggagctgagtagatgtggaggagcgggaacagccggtgtccctcacacgggagtcagaactcatccatgaggaaacaataacatgagatgaaacacttaggagtaattctatattatttcattaaatgtgccataggagttgagaggaggatggcagcaaggtctggggtcattgaggtcttaatgctccgtagagcagatcgataggaacttgccccttaaggattggtggattcttggtttgattcccccaagatgctaatgggggaatgcctggagttggaattgatgcccactccagcgctttgtgcccctccagtggaacgatgcaacactacacaacacacccagcacaacacactcagctcttaaggctgacacaggaacccggaaactccactcttgcacaaatcacagatttggtaaaaagccagggtatgcttcagcaacagtcaataaatgagtaagtaagcgaatcgtggtacagatgcatgtcggaatgttttctagccatccagtcatgtttacattttaataaatagttgttgagcacctactcattaaaatatttggaagaatttttaaatgagaaacgctgagctgcagaattgtttacaggatgagttcagccatctgcaaacaacttagaacacaaaagcctagaaggaaatacatcaaaaagatatgtggttgtttctgttctttatacttacctgtaattttaagacaaatgaaaaagaccgcacagctgtgaactggctaaatcaagagacagcatttgaaatatggggcgtcaggcttgtgcagagaagaaacataaattaccatggttctggaaggcagggcagcagtcacaaacagacctccacctcctgccgagggctccagctctgaagatctcatcttgtgcatggctgcatagacagggatcggtgcctgttacactgggttaagagcttcagcttttcttaaaaatcttcagacctctgccttagagatggtattttgcaaagtgtttcaattgagtcaaattgttatttttccacctggtggtatcccagggcttctatcaatttaccttgtgtatgtcctctgtcctgcctcttgaggcacaatttcctttttccattttcatttttaaattttaaattttcttttttagagacagagtctcactttgttgcccaggctggtctcaaactcctggccccaggtggtcctccctccttggccttctaaagtagggattataggtgtgagccaccctcctggtgcactgttttttcagtccactcatttctgtcccctgcattttccttgggtaaagccccaggcccacttttgccgtagccttctttgatttgctttaatttgaactttcacaggtaaaacctttcataggtttcaaagcagtcgcacacatctcatttgctgccttgagatatagctggatgatgccatcatccctattaaaatatgtgaggggagggctcagaggtgttaactgcccagaattatacaaccctggtctcccaactccagcttgcagggcttccccaccatgaccagcagctggaccagaccctttcttgggaatgcacacttgactacccctgaatcactttaaaactcacctgtctctgaagacattgtttctcagcgacagcttcactagcactgtttggtcttattaacccctttcccttctgttgcccttttgatcctgaaatcttagcccatgttaagaacgcctttcacagatgtcgttgttactaagattctccaatttttagctttttgtacttacgatttggatcatttgcccactctgagtatctatttttacacgtcttttttttctccacacatggtaaattcttggaaagtgagagctgtgtttttcatttccttaatagtggatatttctgctagggggaagtttaatctgagtgagtgtccagctcaccttgaggaaataaaataattcaaccttgaatattttcatagcatttttaaaaattatgagattaaattttcctgaaaaatttacggaaacatgtgtttttcaaaattaagttggaaatattaatggccttgggcatctgcggccagcaaagtcattgccattccagaacccctcactgcagggtttcctttcgtccatttattaaatctaagccccatagtgaggagagacactgctgcactcaccaaaaaaccactgtttataaaatgcttgggcacttcagagacagcagctgttttctcttggtattaacaccgatctgcagattgccagttcttcagaatacagacctttcccaaatctccactaattttgtttatttatttatttattttgagatggagtctcactctgttgcccaggctggagtgcagtggcgcaatcttggctcactgcaacctccgccttctggattcatgcgattctcctgcctcagcctccgagtagctgggattacagtagagacaggatttcgccatgccggccaggctggtctcgaactcctggcctcaagtgatccacccacctcagcctcccgaagtgctgggattacaggggtgagccaccatgcccgatcccaaatctccactaactttaggtgcgtaggatggactgagcaattttggaaattccaaagcaccagggccctacctcctttcttctgtctgcctcccctgccttcccagtgtgcatctgctgaattgaatcattaagagaaagattaagatgagtggaaggtgagcctgttgttgctgacagttcactttccccagtgaaactgtcaggaagacaaagagatgttgaagttttagagtaagtggcccagggtcttacggtatcctgcagtgtgacactgggtagaaagaggtggaggagaaggaaggaagtggcctggcttggctgtcatgcactgccttccttcatttccttacctcccacgtactgccccccacctgaggcaagaggggaggagttttcaccttttccatatcttcttctttattctttgaaactatttttcttcttagagttgtctttggtagagtggcccttaacttagtgtacagtatgattcatacccccgggggtggtcctttctcataaacccttctttcttttttttgagatactctgttgcccagaccggagtgcagcagcaccatcatagctcactgcaacctcaaacttacgggctcgagccatcctcccacatcagcctcctgagcagctcagactgaaggtgtgtaccaccactctcagcttatttttgtggttttgtggagatgggggtctcattatgttactcaggctggtctcaaactactgggctcgagtgatcctcaagcctcagcctcccaaagctctgggcttgtaggcatgagccactgcgatggacccttcataaacgtttcaagcagcattgaaccagaacaaggagcagcgttttcagttgggaattcattgtgtatttttcattaagaacataacatttcttaacttagatgtttgtgtaacctgagttgcaagatgaatttaccacacagtgacagactttaaatttttggttttaatacacatttgcgtattttaaaagcaaatgtaccttcagcctgtgaaataatatgctagataattacaggtactttgacttcagttatgtcttagatttattataactacagtgttgattactacgaagacattgctttgcagagggagatgtctcaaaatgtcacaattcagtgttttattatcagacagttgctaaagtggatagttaaaaattgaggcctggcatggtggctcacacttgtaatccctgtactttgggaggatgaggcaggcggatcacttgaggtcaggagttcaataccagcctgggcaacatggtgaaaccctgtctctactaaaaataccaaaaaaataggcatggtggtgcgcacctgtagtcccagctactcgggagactgaggcaggagaatcgcttggcttgaacctaggaggcagaggttgcagtgagccaagaccatgccgctgcactccagcctgggtgacagagcaagagtctgtctcaaaaaaaaaaaaaatttgtgtgcagtttgtcagttatttcatgactattagtggttattcaacacaaattaagcactgtatcagttacagggttcagttaaataatacagaatctacaggagctgatttagatagcaaggcattaaatgtactagtgagtattaatagtggctcagtctctgcaaatgctgaaaaagcagctctggatagtgctagcaggtggggaatcattattttatatccagatcactagtagcaaggaaatctgagaaattaattttcagttccccagccaaagcagcacaggaagtcacacaagcagtgaggggtcgcccacgcatctgtccttggcaccctgcagccactgagctgcctcccgggcaccagcacagacctcagtagtcgtggccttgctctcaccggttccactgtccgggagacagatgtcagatacatcatacaaataccaatgatgacaactgcataaggctaaaagacaggttcacaatgcttagaagtaaataataaggggacagagtctaaagtggaggtggtgtggacgcctaggaagtctcctggaggaagatgcatctaagctgagagctggccaggagaagcagagtgagggagtgagagaattccaggcagagttgctgcgtgggaggccccaggctcgctgggagaacagagcaaaggccggggtgatcggagtgaaaggccacagggcatagagttggggacaaggtggggtcaggtagggctttgaggtcaccaaaaggatttttcctaagagcaattggaagtcatcttttgaggctgggaatagtggcagatgagtgcttttaaacaatcacagccgcctcaattgggagaaaggcttggaggagggacagagtgaaaggcaggagaccagttaagggtctgcttggtggacagacttagtgagtccagatagctggtggggcttaggaggtggagagaaactagacatccactcatccagactcagggcatggttttctggcataattaactttgtggtaagagtgcctttttagccctctaaatggagatgttaagaaagccattggtcgtggaagtctggagctcagagagtgggtaggagctagagctacaaatctgggagctgtcacttccagatgagatttaaagtccggtggtgaaccaggtaggcttgagaggctgtggcctgaggtggctcgagccagaccacttggacatgtagaagcaggctagagcaggaacagccagccagtaaaaggtaggggaaaaaaaaaaacccagtagatttccaaaaagaagaaactctccatctagtttaggaagtaatctttttgtttggaaatagaccatttctagaaagtatagaagttggttcatgtatctcatcctgctagcagctaggctgtgcctggagaagttaatttaaaataaagaatgagtttatctctgttgagaacattaactttcttgctataccgcgagtggcacctaagtgagagtatatattgaagcgagaagtccagcttgttcacaatatcacagtaaaattgagctcaaataggttctcttgtttatagagtgctctgtattttcatggtggactacatagggcagatattccttcttccattttatagttatgaaaactgaggcagcctgggcaacatggcaaaaccccatctctacaaaaattagctgggtgtagtgtcatgcccctgtagtcccagctactccggaggctgaggctggaggatcccttgagcccgggaagtcgaagttgctgtgagctgtggccatgtcactatatactccagtctgggtgacaaagggagacccagtctcagaaaaaagaaaactgaggctaaaaaacggtaagtgatatgactgtaaaaccttcacacctgcttgtaaatacctctgatagatcatcagagctgggtcacctgggaagtccctaagggagtggcccacaaggcaggccacttgggattctggaatagcctagaagatttttggacacacacttagttttattggtcaaatgtttgagccaaatcccatggatgggttctggggagatacacagtccctgtccccaaggagttgatggactaatgaggaaggcagatagaaccatgaactctgggtgttcctgccattctcttgcagcgatacaggggaacttttgtacctggtgggatgggagagggatatgaatggccataaaggaaatagaggaaaaaagtagggctgatatcgtttgctgaagaatgaatctacataagtatttttcctgggggcaggtccttccacctgcctgtgctgtgtaatttagcgaggagactgatgtgggtatggccatccctcttactgagtaaatctgtcccattatgtagctgtccaccccgttcctggtcttgccgctgagggagcatgcccctcccttggaggtgagctaagtcaggatgttcgggttaaccatgagcctgcgtgtgctaatgctttcagacttcttccttccttgtgtctgcagtgtcacccactagttattttattagctcctggaggacagggagcatgttttcttctcctggtcttggccccttgcactgtgccgggtgcaacttggcgcttaggtggaaaagagatggccgtttgacacgtgttttggctcaggggtttttctcaagttcaacagtaactccactcactcagcccttttatgtggaagatgattcatttgacagccaagttaatattttaaaagtgtgaacttaaaacaataaagaaacttttggggagctggaaaatctatagtcaaaggagaaagaaacagacattatagacccatctgatcgtggaatacaggaacatgttaaattattcataagttgcttgataactggtgaataaatgtatgatggaacatttagaatctggcgaagccttctagagaatccattaaacaaatgcatgcaacagcaagaagttttggataaatttttattcttataaattgatgacatatagctaaactcaaatttgaactattagtgaaaatattccagtgcccagattagtaaattatttttattagtgctttctggctctaaaaactggtattttatgggaaatcagagggttaattcttgaaagtatgatactgatgtcctagaatgtgctttctgccctcaagcaaatggcatggctttgggctacgttctgatgatcacaagtatctctgaattgctttctgtttcaggaatgtgtatcctctctagtcttcattggccaaattgatctcttaaagacattgtggtctggcaaagttgcttcttgctcattaagcttgggagtatgttttaaatagttacattcaattgtttccttgaagcgtgtgaaggaaatgtgcctgtttcagaccacaagagccagggaatttttttaatgtctgattgtggttaatcagttttctgttcttcctggagataaactgcataagaaaaggtcacatgtttcagggctcctcctgcaaaatcagagatagtatgaaatgacaggaagagtgttttccagtctgaggaaaatacttggaaaaggcaaaatattcattatctgtaacaagtggttaaagattttcaaagacattcataaaaattgaagaataataatgaagttgtcccatggaagaaatattcttcagattacttttcctcttctttgatactgtaataaccagagggccatttaatgtcagctaataaaggagtcacagagtaactactaagcagacttaaggaattaactctccccacaccgtccttaattgagttttttggttgtctgaatattttctgtacatattctcactcattatttggtactttttttttctttttacttagcatattttaagatacaacctttgcaggaaagaagagagaaaactgtatatttaaacagagtgaattttgtgttaactctgaaaggacagagactggaaggaagataagtcagggcttgaatattccaggaaggctttgaggaggaaggaaataaagtctgaacagccttgaagaatgggtagacgtaggaaaggattcaggaaggtctttagataacaaaagtagagatccagtggctgagatgttgtcgatgttttatttttatcttctaaatgcttttcttggaagatcttatttcttttcacacattgtttttcttttgtttttcccagctctctgcttccagggctaatggtgagttttctgccgtgtaaaatcccaaagggtcgcttgcatgtacttgttgccagtagcctgttttcattgggtcatttactgtggtttaatatgccacttccccagtggacctgatgtgaagaaagtccccacaatcctgtcttctgtgacctttctgaggccttttccttgttacttggaacaaagatgtgatagctgattgggaggagagtgtttcatgtcatctatcacaccagtcactttgtttttccatgttgttgaatgcagattgagttactgttgtggcctatgttattgttgtccatgttgtgtagatctcatgactctctgatggtgtttaagatgggatgcctctgccatcaaatcccaggagagcctgtttttctccacctcggtcctttcactttcttatctgcttccctgcctcctcctctggtcccacaagcctttcacaaaatagttaacatatttgctttaagacagagcttgaaaacacacgcacacgcgcgtgcacacacacacacacacacacacagtatttagagactagatactgaattgtctgatgagacttagaatttgattctcctaccctgtatcttgctaccaaaaatggcacatgggcacacatacacacttttaataggcaacttagagcccatgaaataatgagagtaataataatagtagttacgaagccttgcatttcctattctgctttggccagagagcaataaagcctcatttaaaaagcagctttccatctttctttgaaaaaactttgtagtagaagtaaacaattctgtttgtttcagtgagagaaaacacccatggatcagccaggttgacagcctagtcagcttgcatcctggtttgtttttttttgttttgttttgttttgtcttgaagagtttttgctgaaggaagcattagagttctacttaatatgcatacaatagaaagtagtaattaaggaaaaggatatatcagccaacctatcttaagaaggatctaactagataaactttgtctttaagacagtcctgactctcagactccacaggtgggtgcaaacaacagtgctccccactggagatcctggggcccactttggcttgccttcagaaagggaagacaaagtgtccctcccaagttacaaacgcaggttgtatactgtggcttttactctctgataaccaaattagccttctaaacaactattctcagcagaagtaagggtggtcttgatttttgtgttttttttgccatccatactagtctgcttcctgtcttttcagagagcaaggctgtttgtaagaaaaatgtgtgaactgaaaaccaccactaccacctattagatgagtacaagataaccagaaaccaaatacgaaatgagctgtcagagctgttgataagctctcttgtgtgaaaggaaagaataaaaatgcagcaaaaggccatgagaattatttttaaaagtaagactatagacaaaagtccaaggaaatcttaatctccctttctctattcctcttgtctcattctccagccaactttagggacaagcaatgtcttcatcgagaggcacatcacatccccaaaggtgggttcttggtgaccaaagtacctgcctacagaaagcagagaagcctgttttcttccttgtgtctgtaggaaagttgtctttcagatgtagtcttctttgttcatctgttactgtgcactgccaggctgaccccttttctcaggcagattgatcatgaaattaaaaatggtttacctgagttaattatattattaggctgggcacagtggcgcacacctataatcccagcactttgggacgccaagatcggtggatctcttgagcccaggagttccagaccagcctgggcaacatagggagaccccgtctctacaaaaaataaaaaaattaatacaaataaataagtagattagctggtgtgttggctcgtacctgtagtcccagctactcaggaggctgaggtgggaggatcaactgagtccaggaggtccaggctgcaatgagccctgagctgagatctcaccagcttggagtgtagaccctgtctgagtccctgagtgagaccctgtctcagaaaaaaaaaaaaaaattaagtactatcttcatgtttttcaagacattttccacttgttactttaacaaagtttacagtattctacttgttttcattccttcaaaactaatctttttctttcttttcttttcttttcttttttttttttttttaaagaaatagaatctttctctgttacccagaactggagcacagtggtgcaatcgtatctcattgcaacctgaaactcccaggctcaagtgatgcttccatctcagcctcccgagtagctgggactacaggtcctgccaccatggctggctaatttttaaaatgttttgtagagacagggtctcactatgttgctcaagctggtctgaaactcctgggctcaggtaatcccctcacctcagcctcccaaagtgctgggattatgggcgtgagccatcgtggctggccctaattcatttttaataactaaccagacacactagtggtgttatacgtgagcattaatatttttttgtcatcgtcacccatttaaaaaaattgcgttttcaaaatgagttgcttcaacctagtgtggagaatcaaaattttaaaagatcaaaattttggtattttaaaagtcaattctgaccaattatagtgatttggttctacctgatagtttaatatttctttgctcttttagtaagtccccagcatagggggaagggggtaggcagtaagtcttagaaaactgtcttgcgaatttactgactcttatggattgggaatttctaggagtatctggaaattaaccgaagcagttctttttcttctccagttagggcaagttgccatgaaacaaataatggtgacttggttggttcatttagttcatttatttattgaatatttatggcctgtccactaattacctggcacaagtgtaggtcctagaagatacacactagggaaaaaatagacacacagactagatccctactgtcctgtcttacattctaggaggcggagagaaaatgttaaaaatgaacaaagtaagttgtcaagtcaggtgctaccaagtgctagggaaggagattagagtggtgggtgccatctggatagggtggtgaggggagccccatctgctaaggtggcatttgagaggagacttgaggtgagagactgggaagtgaggtggggaccgaagcctgacagactagccatgggcaaaccaggcaggagtttagccaaggtgaggacttgtagaggagttgggcagggatgtgaaataattagcttgatgttctgcataggatgccctgggctgcaaggtgtggaactgataagccaagacctcccaggaggctttgccgccatctgcagaatcatgctgatggctttgaagagagaggcagtggtggagagaagtggctgatttggggcatgttttgaataaagagcccacagatttgctgaagacttgactgcagggtgagaggggagtcagagtcaactccgggagtttgggcccaagctactctgtgcatggaggtgctactctgtgcgtggaggtcccactggctgagagagggaggggtgagcaggagctggttgcaggccaggggagaacaggacttcatatttacgtgttgtttagttttggggatgcttgttagagatccagctggggatggtgattagcaggagtttagaattcagtggagagattagggctagaaatgttttaaaaactgagagccattgcactgcagatggtggggcaggctgggttctggaggatgataaaccctccaagggaaggggaagtggccaggagccttccaagaggcagaggcgtggtgtaatgtgatggtaggtgcttcagaggggatgaccgcttcagggaggaggagggaatgggggtgtgggattggtcaggaggagcacaaggcacctaccccatcttctggttctgtggttcctgcgcagaagaaaaaaatacttgaggggggctgcaagggaagtgtggtccttggggacaatcagaatttggctggcatgaaaagataaaggttcagcgttaggttaatttttgctgatgagaaattatgactcttggagagccccatggagggatttgggggcctgggatggcaaaggttcaggtcaactgggtcaggttaggcaatctttggaggggaatggagcgagctggtggctagaattcttgtaacatctgaattaaacagggatggaaggcctggtgggattaatctgccttcctaagacagatctaagggtgagcaaactttttctgcaaaaagacagtaagtattttaggcactgtatttaggccatacagtttctgtcagtgactcaaacttctatcatagcacgaacacagccatagataacacaaatcaatgggcctggctctgttccaataaaacgttattgacaaaagcagccagcggccagatttgcccataggatgtagtctggcaaactgtagacaagggagttagtaattggtgagagagggatgaggagatgggtgggaagaaggggcccgagacttggagttgggaaaactggagctccaggagccaagtcctcagtctgtccccatcctgatgaggtgtccatcacccacagggagaactaggtgtttccactcctcctccttggtgctggagccttttgaaaattgcttaatgaaataggcaggtaatcccaggtctcatattcaggagcgtgatgagcttctcctcatctccacagcagacagactagaggaaagagacttaagatgtaatcagagatgtttacattgacaaaagaaaacttcttggcaggaatgaagctaaaatacatgaattactatctaggaaggtctgaagattgttggaggttagaatgaacaagaccaatttccttctcttacctggaccacagagactttgttggtcttttccaagccctagatcttttcatgtgaatgtgtcattgtcttaactctataagaggcaaacctgttctaactatcgttttgatgtgctataaatacactgttctattatagatctgtttataaacagatcagtgtgtgtgtatatagagacacacacactgatctgtttataaatacacatataaatatacatacagacacacatgatctgtttataaatacactgttatagatactcctaatttaagaatatatatttaaaatttctcaagttgcaagtggtaaagttatgtttaattatttatcttaataaattgaatacctattagtgacattctgagtgacaaggttgatttttccagcctatcctagtattctttgttggtatgattttatttgccaaaataaattggtttgcctcaaaccacacactaggtgctaagtatcttcaaagcaaaattcaatgaaacttgaaagtgctataggactgaggttgtaagtgacagaaacccaattcagactaagcagaaagagagctttgtctccaggatccgagggtgcattctggaggcccgagctaggatgtggagcaagggatgtggctgagcccacagtgcagctggaaccagggatgcaaatgccgccaggacctctctgtttctcacctctgcttccatccgcatctctgcctcctccaggccaaattttggtgaacagtgactgtgtccattctttatatctcatcattaaattatgggaagagtcctgcgtgaaagtccgaaggtcagatcctggaaagaaaactcattggtctgcttgggcttggggccagccttggccagccctgaacaattctggctgcagagtagagaaccctgtgatggccagagaatagggtcacagacatatagaatcatcactcctgtggtaaccaggtagatctggggttcagggaagggtgagatgtgggtggtgagctgggcattcaaaagagaaggtaggccgggcatggggggctcatggcagctcatggcctatagtcatagtgctttgggaggctgaggtgggaggatcacttgaggtcaggagtttgagaccagctgggctgatctcagaacccatctctacaaaattttttttttaaaaaaaaacctatctgagtgtggttgcacgtacctgtagtcccagctacttgggacattgaggtgggaggatcacttgagcccatgagttcaaggctgcagtgagctatgattgtgccactgcactccagcctgggtgacagagcaagaccccatctttaaaaaaagaaaaagaaaaaaaaatgatcaggtatatgttaagtaaacatgaaatctatataacagaacaaaaattcactcttatgtcaatgtcagcgtgttaatgtagatctatttactgagacagactctgtagtggcagagagtggccttgttaagccaggaccctgttctgcaggctgtgggtagaagctaggaagtccctggagtttcacccagcttttccatgaatgaccttggcctcagtctcttcatttataaaatgagggggttagattaggtggtctccagagtaccctccgagtctaaaactgctctgtctgcagcatcatatgtcataggatataatagactctacaacaaggtttaagatgacaaattttaaaaatactgctgctacacaagcatatattaccatttgttgagctgataaggcttgataatgtaattggaggcattaaatttttttttcaaaatggaatatgaataaaattttatatttctcccaaatatttctctcagttcttagaactgtttattacttttttgcctgttattttcccactaggtctcattgggctccacatccttgctctatgtttatgtagaatattaaacatcattccctttcatctcactgcaactgcttctctgtttcatccgcactttatttccactttgcattagggaatacaaaactgagccatgtttaagcaacgtagtgtcaatcaccccgtttagattccattttcccaggcggaggagaaggtaaataaattggatccagtgagaagcctggatattaggatgtgcccatcattgtctctttcagcagaactccacacagaggacaggcaatcccctaggctctgcacgggtcactgggcactccaccctgctacacagcatcagcataatccactcccggagccctttgtggggcggtgggtcttggccagcctgttttccccacagctgctgtccttagaccccttcatgcttcacatgcattaaaaggacctggtgttgacaaacaagctgaggctcctgtgggatgaatctcccaactgggaggtgctcttctgtgtgcagaaagagcacctgattgttgctaaggtttcttttggtaccaaaatagtaccttgtgctaccaagggaaatactgtaggagtgaatttcccagatgcaatagccgtcatccttctttgatgatttatgagtccctgttaagtcaaacattttctttcaatattctaaaattaacaatttcaaaaatctagtgagcttcatgtagaggattgtgttttaataaaagtgatcattcaaaacacctgtttaactcatagctttcaattccaatcaaagctctgttaatcctttgcttgggatgtcttgatttttctttttctttttccttaaaaaaaaaaaaaaaaagacaacacatccatgcatccattggattgatatttgattcttcttggtaaaccgccagttttaattaagtttgcacattgatatctggctggaaattggatgaaattcagcatagtaatttccttcacgtgttcttcgtgttctggagcagggagtgtgaatttacgtggctgaagacattatgtgactttaattacacctgcttttgtgaatgaaatacaactttttagttttgatggtgttcataacaatccttttatgcttcttgaagggaagggatcagtaaaaggatattcagttttaagctatggcaacttttattcactatagcaaataagttcacatagggattttagttaggaaagcttgcggcattttgtattgtgaaaaaaatgtactctaattttaaagaaatttcaggatattccgtgaattgtgcacactctatgttcttgacaatttgtattcttgagtatattacccacttttttccccactcatttttaagtcaatttgaacctaagaaaagttggacatatacataccttaaaaaaaaaaaacctcttaatcctaattctcaaatggagaaattagagaactatatttgttttgtgtctctaagttaatcaaaatgttaattctttttttttttttttagcttcttttgatttctcaagtataaagtaaatgggtgtttctggtaagctcagctggtgtttctctgagcactttttggttttgttacgtgcatgataaacatgcatggtaaaggttgacagttacctaaatggctttcggtattccttcttggcttccttggattttattggctaattgatgtgctttaaatgtttttttctgatgtctttgatttggtggatgctctttactgaggattctttctgtcccatttcctaaccaccacatcttgaccatgagtcattgtttttctatcagtgtaatcaaattaatttgatttagttgaaggtatgggctagggcttctggtggccttgagaatataccttccaattttgctgtcatggcactgttagccaaccacatgctcagggtggtgctaacaaaaacactgtctgaagaagactttaacaagtgctaatattaagattttaaccaagtaagaatcactactaagattcttacacgggcataatacttttaatcttacagaagaactgtaataaatattctaaggcaccatgatttttggactttgtccttcactgaacttcaaggtcctacatacttaaaaacaaaagccaaaaatatgtcaatgaatttctttccatcaaacatacaataacaatagaaaagtgggtttttttccctcccccttcaaaaattgatccctgttcactaggagaataatttccgtttaagatacttattttgaaaattacttagatgggatccagaaaaagtaaagggaaaaagaataaagagtaaaaatgagtagttctgttgtactcttcctgctctttccttttggttacgtatttagtttgaataggaatgctttaagacatacttaaataataatttaagtcaggaagactaattctgggaagaggagaggagaacagttattgagagaggctataaattgaggtcagattaaccaaagaatatggccatccatatagaaacttaatatggagacagaagagattgttcaaagaaaggggagagtgtggcagagaagagtggagttaatttactatgatatacttaattttatatggggtattttaatcaaaacccaatgctttctatatttattttcattataaattttattcattcattcttagcaagtacactcaaccaggatgatcaaacctgcttcaacatgtaagttattatccaaaatgcagccttcctggagccccattggggatcattagtgcaaattccactgtgttctttggtcctgggggactgttcaggaggaaggtgatgccagaattagccgatcgaattgcggcactcagtatctccaaagagcagattttccagagatagtattcacttatacatccattacagaactgtcttcatacttattttcagattatccattcagaatcattctgtgactctgaaaaatctgttttagagtatacttgctgagatccttttaagtaaacaagtactttttacattgtccagcttgatgggcatcaagactgttgaatgaacacgttttgtgggattttacactctttgtggccgagttgctttgctttggtggcttgtgtctgagttgtggtttcgtctgggcagcatggttgctgcagccttttggccggtgcactttacactgcttgtcttgctttgtgctgtttgccacctggatgattccatccagccattgaacctcactgcacaaagaagaaaagaacaaataacccatgtgtgttagggcatgcaagatgctggctttcttgaggatggcaaatctatgaatagagtctggataggctaagttatgcagcatgtgttgttatgtttgggcaggtttccatagtccaaggcacatcagctgagcagtagcaggtctagcttctggtcttgatgctaaaagtaatttcttgtgttattttagtaataagtcacttatttggcttcagtttattaatctttttgtcatctttaggtcctttaagctcttaaactatggaatctgtatcttagatcgttatggatgggatcaacagatgaggatataacggtttgaaaagagccatactgacaaaggtgcttagttccagagagaccaacctaggtgtcaaatcatggggccattttcactcttctgtgggttttaaaatatacacttccattccagacctaaagcttgtttgacgtttgctcttccttgctaccctacatagacatacattgcctccatctttaaaatgctctgtagtacttgtttattgctattaatgtataattggcctaaaacaacaagtgtttatttgctggggattctgcaatttgggctgggctctgctgcgcagttcttctggtctcactcacgtggctgcagtcacctggggaatcactggatctggggctgttgtaaccaccttccagaagaacaaacccagggctcagtgcttgtcaggcttgtgcttatggtcttgtttgctgattgcccactggccaaagccaccctcgcggccagtaccagagtcactgtgggaaggggctgcataaggatgtgaacacctaggagtgtgattcatcggggaccgttaatatgcagtcgtccacatatttacacgctgggcttgtattttgaaagtctgtactacagacttgaaggacatgtctctattccctgtcctaggctgtaaactttcagaaagttttgcttgacagtatctacacccctacagcgaatgaggtgagtgcataataagttttgactgtgtatggcagctcatgcctataatcctaccactttggggaggctgaggcaggagaatcgcttgaggccagaagttcaagaccagcctagagaacatagtgagaccttgtctctacagtgttttttgtttgtttgttttaattagctgggtgtagtggcacacacctgtagtcccagccactcaaggggctgaggtgggaggatcccttgagcctgggacgttgaggcggcagtgagctgtggtcataccactgcactccagcctgggtgacagaatgagaccctgtctttaaaaactaaaaataaataaatttgaaaaataaatcagttgtggtgacagaggtgggtgtctgtacttccctgagtatggccaggagagaacgtttcctgttccttctggttctttctccagttccttttcaagactccattgtggagtcctcttcctgaagattttcacaatttttttctctctgaatccctttgtggcgttatcaattcctatagctacgcttttcctaaagctttaaataaaatctctttgccgattacttctaaatgttttcagcctcagaaccacatttgtggctgcatgttaaacatctccacatgaataatctgtggacaaaccaaaataatgcatcttctacgtaccctaagtcgacttctctttctgcgtttcctgtttttggtaatggcttcaccactcttccactctcaagggcgtgaaacctcttaagcattcctagcacctgttgcttggtcctgcattgtgattctggcctccagtcctcatccttgcttcaaattatattccacacactgagctccttagagggtcctcgtcatagaaccccccggctcataactttccatgcttcctcgctgcccacagaactcggcctggcactgaagatccccatcagtttgggccttttaagttcttcagccattttctgggtgtaatgacatgctctcttgaataagaatccaaatccaagtgttttccctccttcagggtctggctccaacatttcctcctcctcagacaaactcagtgggtaacagtctcttccctctcaatactatcacagccttttgtgctgttagcaacttttctttttatttaaaatggacattatttttttacagaagttttaggttcacaacaaattgagagaactgtgcagagagctcccacaaagcccttccagacacacacattcagcctccccaccactgacatcccagttggcaccagagcaggacggttgttacattcgatgaacctgccataacatttcattgtcaaccacagttcacagttgacattagggttctctctgtgttgtacattctgtgggttttggcaagtgtataatgatacatacccaccattatattaatagtatgatacagaatagtgtcactgccccccaaatctgtcgtgcttcacctctgcctccctccctcccccaaatgtgctgcacttctcatactcacctcactgtttctgttgctcacctatgactctctccaccccatcgtagtcttctgttactatatagatctctaaaagatgtagattacatctttgaaatcccagttaaagtgcagtcattatctcctaagacccaggttttatagaaattggaaattttctttggggacacaagccactaaggttagtggttacttaagatgaaacttgacaggggagacattttacagcctagtaaaggtcagtaagtatttggtgacattagagatgatttatgctttatgtcatagttgtgtatgctccctcctaaatggtttctctatagattaaaaaaaatgtatgcttcctaaaacactttacacctctgctatggagagggagagagagaaagagagaagaattggaccttggacaggaatacataagtgcatccttctttaaggcagtctccatttctaatgtgaataataacctcttaattggttttctaaatttggacttataaaagatcctattataagaaacaagcgagtaaatgccaaacaggttaacagtaacatatgcagaatatggtataatattgctgcaaagaactcggccaaaacggatacagcgttctaaagttgttggaacagccttgtcagcaagtgtctaaatgttcccccaaatctgtaaccgctaaaggaaacaaacttgaaaataaacaagaagtaccataggaaaggaaggtgatacaccagagcaagacattacagtttcctatagcaaaaggtgtgatgcatgatagttttagattggccagcagtaatgaaacaggcaaggccacttctgttctgtcccgtcctctttggctgggctctttggtctcttctgtgatttgtggacacagttttcacaggtgctcagggtggcattgcctctcagctgctctgtgaaatatcagctgcaggttctatgttgagttcatgttcatagtgactctaagtcccataatcatattttgatttaactacattttgttttcaataaaagtcagcaaagatctattaagcgtctactctggggcagccctctggggacagtgatgacaatgacagtgaagtgcctgagccaggcactgttgtggactccgtttttcctcacagcagctccacgctcctagcactgcatctgagatgccttgagaagccgacactcacttttctacctgtgaattcgcttgcttggcctcccgcttgcttatgcccagttgcctccatactggggcaaagatccgagaaaacaaaactacatgcgagtgtttagcatttattgtttccttggtgaccagttgtgtgaagcatttttggaacatattgcagacagctctgggtgtggcgagaaggaatgacggtccgggtgagaaggactcagcgcctgccatgtctcggatccctttgacctgggtttcttgccccaaggtcccctcccctgcctgtaccctttgctcctggctccaaggagcaccccaaagttccagcctatcctgaatgatgaagataattatattttttccctctccttactggtagctgggacaaagttgggatttttttccatgaaggtatttttactgtgggtaagtgggtaaaataaaaagagcagaggatcgcatagacttacagaaagtgagtgtgttctacagaaaggctgtgtgtttgtttaatctagctcccatctacctcgtaagcagctttccctccggctactttaagtagttgagcaggtttttctttttcttttaaaaaattatgtccctttcatttatttatgtgtttataaaacaagaggcagttgagagccatggccaagagcccaggttctggagctgtgttgcccagatctgaatcccctgcgccatgcaaaggtctctgtgaccttgagccatcacttaactcagcctctgctttcctactgtaaagaggggggctgtgtaatagttgtgcccatttcacagggttaaggtggttacatgggaggctattggggtggttagcagatacccgatgtatactaagccttaaataaaagttagccttagtgatgtattgttatgggccattttttgaaatgatgaatgttgaggatgaaaaggggccatacaaatagaaaaccaaagaatataaaacaaaatatgaaactcaaccgcttcctacaagtaagatatttttttcttttgattggaaattatccatcaaatttgataatgtaagagagtcaagaatatattatgtcctatttccccctaccttttttccccataatttttatttcaaaataagctctagagattcttagctggttcagcaggtcatggagtaaaattaaaaaataacaatgaaggggcactgagctaggtgccagggatatgagtgtgcctggtggcctacaccggaggtcatgcttcttgcacatggaatagagcagatgacattgcttatcccagtggggtgtgagagaaatactccaattaattgtatgtaaggtgcattttgtggcataaaaatgacaaatccagctaacaccaacttgtcaactttagtaaggatggtgcagattattagggagaaaaacaatgttgtacatactatactaaaaataccattttaatgtttgtttttattttcattttgaaacaatttcagacataaaaatgtagcaaaaataatacaaagaactcccatatggccttcacccagatgctaacatcttatataacaaatagtacagttatgaatatgaggaaactaacactgatacaagatgactgcgtaataatagaaagctcttatttacatttccgcactcattccacttttgttttctttcttgtccaggatcacctgatgcatttggttgtcatgtctcttagtctcctttaatctggactatttcctgtctttgtctatcatgacctttacacttttcatgaagactggttattttgtagaatggctctcaccgagagcttgcttcctaatgattacattcattatgcagttttcacgagaataccagagcgttagtgttgtgtccatctcagcgcacgtatcagaaggcgcgtgatgtccactgatctcatcactgaagctgttgactctggtcagttggttacggtgatgtcagtgtcagctctctccactgttaagtcactgttgtttccctttgttcttaagtatgttgtgggagatacttagagattgtgtaaatatcctgtttctcagcatacttttgctcaaaaaaattgaacatttattgctgattcttaatgtgtaacagttattactgtggtatttgcaaattgctgattttttaattttcattattccttctacatagttgaaattgtactgtaaggaagagtttcctcttcttccatagaacgtgaaatcatagattcttattctatggctactgtattagtctgcttagacccaccaccaaaatgccatcagttggacggcttaaataacagatacttattatctcccagttctggaagctggaaagttcaagatcagggttctgacagggttcggtttctggtgaggggtctctttctggcctgcagatgaccaccttctgcccctgtcctcacatggtgggcctgggctggggatgggggcattgagctctttggtgtctgtacttaaaaggacattaattccatcagatcagggcccaccctgatgaactcatttagccttaaatacctcctaagggccccatctccaaacaaagtcacactcgaggttagggttgcattgtaggaatttgggggagacaaaaacattgagcccatgacagttacagtctgttattatcactatttacaaaaaggttattaaaaaatatttggaagagggattattgctaaagcaaagaaactctgtattgaccatcaatacaaagtaaaactgaacgtcgtatcctgtggtgtgttagtataccgtgtgtggcctgttgtgctgctttctgggcagggtgcatgacttggctcctgatcgcgagaagctgtcattttagttcctacctactctcttgtccctgttgccatgttcctgtccattagtatttagtcttgtaagaagaataagagaattgatgtgtcaaaccttgcctgagtctgctggcttaattgggtggatgatgatggaaggtgagaggacccagaacccaagtatgttgtagtaattgatagatggtgagtcatccctgcaatttgcatatcctgtcccagctttagaggactgttggggattttgaaaccaaaacttaacagaatatgaattctgctgttgctcaagtttttgagtttgttaccctttgtggctcattctgaagttttgctgataatcatatatttgctaatgtctaaaaacagaacggttgggtcactgctgtaaggcagataaatacagcagttctagaacctgctgacttggtggattcacatctacaagggaaagcagttttcgttgtaaaaatccccatttcatgtataagaaagatgattcctatctagtcatgtttttaacagtcatctagtaattctgtattttaacatctaagtagctacttatattctgaatagctacaaagcagagcacttgaaacaatctttaaaacatagggctagaggaaaaaatataaaccacatgattaaactgttatggtgatcatcagggacagtgtaaatcattatggaaattaggtggaggaaatggcattgtatcattaccagcttcatatcaaacaaaaaggctgtttgatatgaaaccccagccctccaaataactgggaccacaagtgcatgccaccatacctggctttttttttttttttgtagtcatgaagtcgccctgtgtttcacaggctggtgttaaaactcctgaccttaagcgtcttccctccttggccttcccaacatgctgggattacaagcatgagctactgcgcctggccttgggtgtgcttttggagtcagatggaaacttcttgagaaatacagagagcatcttgtagctagtccagtcaaccaaagacatttttggagaacatctaataccgcttccttttgtcatctagtgaaagtaaaatatctttttttcttaatcctgttttgaagacatcttatagaaaggagggctcccctgctcactccttctttagaattgaacacttttattatcacatgtatcatgtatctacatgtgctaataaaaacaaaaactacagcaaagactgggttgtctttggttggaataggaaatatatttcctctagagtgttaaaaagggtaagagaaaactagtgaaactgatttagctaatttagtcaacaagttaggaaaatgacatttcctaaagttctgatggggttagctctacctcctcagtggaaatagtaaaccacctggaattttacttttagtatatgtcattatttgtattttaaatttatcttcagtgttgtttatatattactttaaagtcactcttgatttttttaattataatacagaactttgttttcttttaaaaggacaacttattttatagttagcatagattgctttcctcgaaataaaaattgtcattccattctagcatcctctgccaattgcagtatgactcgaggtatgactgcagttgtcttagaatcataggtctagtgagtgctttaggcttccacatttttgaaaagaatgcaagtatggtggacctttaaccacataaaagtaaaatattaaatgaagcatgcttttaatagccatcctgtcatttttaaggtttcaatagtgtatgtttagaggcagtgaatttaaaagtgtttgtatattaaagcttaataatccttaagcattattaagtttctggtaaattgttctgtttgatgggctgtcaacaaatcatgtggaaataagagagaaaattgttgttttggatttttttagcaaggagagttatgtaaaccaaaaacaaaattctgaggtccccaaaccatctgaacggacccctcctgtaggccaagggtgttccaaagttaacctgaaaaacgtgttcaggccatgatggaagagggggttggacatgcctcattctaccattttcccttttggaattcaggagaagccaaccagcattaacctcaacacagatcttaagtctgataagaagcatttacagtctgttctttctgaagcttgctacctgaaggcttcatctgcatgatatacccttggtttccaaaaccccttatcctaactcagacattgctttctatagaataactctttgaaccagttgccaatcagaaaatttttcaatctacctatgacctggaaggcctgccttcccctgcttcaagatgtcctaaccaatgtgaatcttacgtgtatctgatatctcatgtctccctaaaatgtgtgaaactaggctctgccccagcctccttgggcacatgttcttaagatttcctgaaggctctgtcatgagccgttggtcactcatatttggctcacaataaacctcttcacattacagagtttgactcttcgttgacgttactgtttcctgagtatacagcaacaatttaaagcatttagggtacaattttttctgtgatttttgagactttttctaacgatcaagattcatactataaaaaggacttaaataatggatatgaacatttataagtttgagatgctgtgcacatttacaaaaacaaacaacttcttcaaaaattgcttggctggtggaattagtctgtggagaatattttattgaatttattttatgccagtaaaataatcttttagtaagtcatcttgtgtttaatcagtctaaactttggtaacttggtaaacagaaacttaatcattggcattgtagcttttgggtttctgagagatcattatgaatatcaggatttttctttgctagatataatagtaaaatcactttaaaagtttataacccagggaatgagtttaaaatttggtcaacaactgtttcttgtagttggttcctgggatgtaccaagtgtgcaaaaatgaatagatctagtccccacccttaaggtagctgtaatattgtagggaataatgacaaccataggccaacttttctctcattaggaaaaattgtgttttatcctgttgtgacagctaatgcttatattcttacattctccctagactgtctttacataagaaattactagagtcctcaaataaagaatatcatggggattcttaaatttgacagtaaaagaccttgcacacaggcaaagcccttgcatggtgaggtggcagcaatgaaagcacaatgtgtcatgtatcccagcaggtttgtacaaagccacagccagtggctttccttatcttttttttttttttttttttttttttttttttttttttttattacatattagcttttggttaaacaaatgcaggtctattttcagtatttctttcacattcttgatgagcagggaaaggcaatgtattagagtttatgtaaaagagatatttgtgagaaaatattaaagaaactaatacgctatttaagatctgtattattcacctaataacctttgagagatcacttagggcaatctatgctgttcctaggaatatgtgtgtgatgctgggtggtttggtgggagagactgtgagagttaaatactcacagtctgcattttatcttgatgaaaactgttagcctcaaatgattcagaagaatttttagaggtttccaggtttaaaatgtagtgagaactgcctggattaaatctgggtagattgcatgcttgattcatgttcatagcatatggagaatgagaaattaatgttaattgatctaattaggaattaggattctctgacgtctaattctctggtttattttgctcatcttttttttatagttgatagaatacatagaatgcgtgggaggagatggggagaagagagaattatttatgcaaaactcatgtgatggcaaatgccctttttcctaaagtaatgaaaacaactagtagcagttttgttctcttgacagtttgtgaataggaatatttgtgggtaggagatatatattaattggcatgacatatttttgaaaatgagtcatgaaactgtgacagttgttttttactaggctaaaagaaagtacttgttatttttgttatttgtaaagctaaagtatttttttgtgagtatacatgcgtctaaatatagatgaaaatatcctgttttcagctatgaaaaagaaattgagcttatggttgttttataaaccacacccctatactttacattaaaatatgaagtaaatttgtatctataccgggaagtgattttctgcacttcagtgtgatgatggaatataggtgtgctaaaacctaaagtgaaaaatctttgtaacaacttactgtactgggtagctcatccttattctcctcaattttcagaaacattttcaggcacaaaagaaaattatgtaagaaatgtagtgtggtatgtcttataaacaatatcctcgtgttctgaatacaatagctttgaaatattacttgctaaacaattatttctttagacaaaacttgagttgtctcttggcttttattcttttaacaacatgcatttttagaaatagtctcttaggctaaagaacataactcaccaggaaaacatgattaattcagtatatgagaaaagctctgagctcaaaagcaagttactctttttttttaagcagaatatattttagaaatttgggtaggagaaattaatatagaagattgggatttagatatcaaaatgctgagtaccccatgcagtcatctgatttatattccgaacttgcatagtttttgcaggctcctggaatgcagcctcccaccaggccatgggaaagactcagcgggaccacgcaggatggctataatgtcatctctgtccatgtggcactcacttcaagactccagagtccagctagaaaggactctggagtccattgtgtaggtgacattggtgtaagcacaggcctttatcagaagtctgaatctaccttttcttcttgtgacccaagagataagaaaggccatttcccctccctcctgagttatttaactttatttctcttctgttcagtgagaataatcttatttcagtgttgcgaaaaccacgtctatgtgaaaggtttttgacagtgtttaaaacatgatattgctgtggctaagcgtgaatgctgttgtcgtggccctgcctcctgcctctggccagcctgagtataagaggatcactttctttctcagcactgccaactaaatgccaggagcatgtagaagaggagaggatcgtatcacaaatacctggggactgttttgtttttttaactccaaagcccaccgccaaatatcctgtttcctcatccctggggtaatagatgcataaagataggtgtattttgaaaacatctcccttagaacaatagactccagatttttttggatcacatagctgtgtttatgtgaaatcagggcatacgaataacatgtattgtgatgtatacattatagtcatatagaagtattaatgttctatacattttaatgcatatttaagactgaaaaaggtaagattaagtattttcagtaattttaacactacagaaaatcttttgctctccgttagagattttttcatgaaagcagtaaaactaatttttgaattttctgaaaatgttgttttaatagtgattttttaaaagcctagctcttaagtttagcatattttgattgtcagttttaatggctttcattgctgaaaaatacaccccacaaagatttgtaaatacaagtggaagaactgtatcactggccatttttactaaatcatacgaaattattatgctccttttctcaacacatctcgccagttatacaaaggtttttagttgactttcagatgataaaattttattctgaaacttattggaagtttattgtgtttttaaacttttaacaaatagattcaaaaaccattaacaaatgggtttgaaactctctggcaagatttctaatacactagaatattctatttccaagttactaagtgtgctgatataaaagttttcataggtgacacagtttcattgtttttggcaaaaagataacaaaacagtggaaatattttcaaacatctgtttgtataatactctttcaaagctttggtttctcttgaaaagcagttaatttcttactcaatgttgagtctcacctttactttgaaaggaagcgtaaagtgtgctgatttttttttccccctgctaggtaacatactactgagaagcacctctgacccctgcaaaggtccatgaatttggaacacatgttttataagggaaaagtgcatgactcatctcctaaattccacaacttttttttaaagtgcttgcattcttcttccctctcaaccatacacagtagttctttgaatacaggaaataagttagcaaatacccgaagcagagaaatgttagaatcatctttactttgatgcaattctaaagcaaacttcataggctgtgtaatttattctaatccttgagtcttcaaatattgactggtgtttctatgcctctgcccgcagtatttgctgacaaaggaattcattcaaatttgatgccatattggtttttacatgctttaagccatttttgccttggtagaaatagcaagtgcttctccagtaatatgtggtttttagtcttttcctagcagaggaacccagaaagaagcttctacatgttaatcattaaattaataaaattttgtgaagtactgaatttgtagtgtagtactgcccaatgttaaacatagtgaagaaaactagagttgtttgtcttcaggtcctgagtgcttagattttaaatgacttgcgcattttgatagctctggagtatcattagctggtatctctaggcacagtgtacacttagggaagctttatcatgaacaaaaatgaatggaagcccacattttaaataaagtcttcccagtcattttaattgttgtgaactattcttttcatatctgatgaaatcatcagtgctttgacctcatcatgtgactgatagcgagaaccctgggagctcagggctcagtcttaggcctgccacgtggcttcttgttgattggtcctgtgtgtttaacattagcttcagcccatgtggttgtttttcaggcatcctcttaagcacttacctgttttgtgagcgttgctttagcttagttaaagccagatggtatgatctgcaaatccacttaactgggcacatgtaacctacaattggttgcaatgcactggacctgagcagtgcacggacgtcccctgccaaccgccaacctctaagctcctactgttcctgggggtacctcccttccaatatacagctcatgacgctcacattggactgaggagggcattcgtcagacaagctgtgtaaaggcagccttttagtataatgtacatagagaagctctgctgtcttctccccgaggagcacaccgcccttgtggaagacccttgcgacccttgccttagagctgcggtctgcccctgagttagacgcttccttcgtgagcactttggtttttctctccatcattactatgaaaataacaagtgatcaagaatttaaacagtacggaagctcaccattacaggtgagcttcacccccgaccccagacacctaaacttgatctttgtgctttttttgtgctttctcagtgagtttcatagacaaacacatgaatgtgtaaccttttttttaaaaaaaaaagtcaatggtagcacattaaacgcatctctatctcgcttttctcactctgcactatttcttagagaatgttccatgttggtttacacagctatacataattatttgccccggtgtttgctaggtaatatgcttgtgccattatttatgaatttgtcatgttaggcattttcttttgagtttctgccaaggcagatgatgctggctctctcacaccatctcttttctcccctcatccttcttttttttgaaataatgcatactttttttggtaaaataatagcattcaccttactgtgactcagttatttttagtactttgtgaagtactaaatttggcgatttagtattgcatgatgttaaatagcattgagaaaaaaattatagatttgttatagtctccttcatgctaaaggctttcctcccatgtccggtggtttgttgctctccagtcaggttttagaacgaggtgctggaagacagacgacttgtcccgggtatgtggagtggcggtgcccgtccactgacagtggggaagaggccagcctttgtgctgccgcccactggcggaattattaatatttctagggcctttccgccagaatgggaatcctccagtgtcccctcggggagtgacccaggccaaaggtgcgattgcagcagagcaggggacagcggcagagggcccaggcctcagagcacagatggtaactggctcctcccgtgctccgtgacgcccagcccagccctgtgtgagctgggtcttcccgtgcccgaagcttcttgggctggggtttctgaggaatcagtcctgtgcctctcatgcgatgggatggcatggacagcaacaggcagcgcaccgtctttctgccacctgaaccccagctgtggagcccctcagcatctgggagcacatggcattgagtggccaccggcacagaggtagcagctttgtctcctcttctgtctgctaacaatcctctactacttttctgtctttaaaaaattctttgacatttctcgttttctattgtctgctctccaatgttcttgtcatgtttggtggtggtgtttttgattttcccccaatctctaacttcctttactgtcatcttagcagagcttctggaaggaaaagagataaaaatgcatggtcaggtcatctcttaaaatgggaatccgggaaagcagtgtaaacggcagcatggtacccttcctctcattgttctttcaggatggatgctgggcaggaaagcaggcggcccctctgttgtggtcatggaaagaaaaacaaaagttctggtgtaacagaattaggatttcattgcttccttctggaatcttaacgaaggtcccaactgtgaagtctgctgaacacatctcagttcaaaatgctgaactgtacatgccatccccttctccattgtcttacaggttttattaatgatgtgtttcagtgattgattttctgaatgcacggctgtcactcactgcttactttttcagtagatgtggttatctggggtacccagggacacctgtattacataccaaactcctccccatcttctccatggctagccagatttaggtatgagatttagggcttctggccagcttggtatcatctagcaccttctggaagctttgccttcacagcttacttggggaactctagttttagaacatccttatcccaggatgaatggaaagaaagataccagggaagtattaaattattttagcatattaaatatctgactaaaaagtaaaatgtttatttgaagttttcaagatcagtttcttagagtgctgtgtgattgctagtggtcatgccatttggatgagtgaagttcttatttgacatccattaagtatttgagtgtcttcaattgcaagtggcagaaatttaccttcctctagcttaggggattgattggtttctgtctctggaaaggatgttggattaggctggcctcaagatcccccgggtccagagattcaaatgatgtcatctgcacgtggctcttatctgtcttatcccgtcttttctgtgcatcaatggtgatgcttaactttacgtggctgaagacatggttacaggcaactgcaggcatattagcttcatttagcatctcttccctgtcccctgtgtcagtttcaaaagaagaccaggaacttgcaatgcctttgattagaatattggagctgtggcttttcttccagtctttgtccctgcactgccacatccacctaaatgaaacacttaaagaggttatgtgtgtcttccaggaattaagtggatctctggaaagttgttttgtgattcatttgaatttgtgggaatgtctcccaagtgcaggcaccagagccctgtggtggctaaagccctggaatgggccaagtcatccaggcaggagactccagggagtggcaggaactgtgcccagctggagggtgtatccccacagctactcagcaccagatgagtgatgccgggcccggtgccaggtcttcccatttttaaaagaagccagaaatccaaatttgtatgtaaatgttctcaagtctgaaaagattggtgattaattcaagcattttctaaatcactatctgggccaaagcacacatcactgtgatctcttctcagactcgttttttaaagtataaagcgagatcaagagtgctggggcactttgctcaaggccagagggtggtgacgtggctgaccagggctcagtcataggtctcctgactccctgagcctggggcccttttgaatggaccacgttgtaagctcttgttttcattggcaatgtctttgtttgaatttttaaaaaagccagtattacctctgtaccagattataaatttttggcctgaattcagtagttttatgtcagattctgtggttcatgggaggtagaattttaacatgactacattcttttgtatgaagttgacagtgggccagccggcaaggatgtccgtaagagtctgattgagcttgcagataccaagttgacagatgggagagtttgtgtctatgttataaattaaagtaagattctaagcaaaagtttaaatatttctgatgacattttaattttagtcaagtagccattaatcaaaagattgacttaatgattcttgtttaattgaaaaatctgctgaagtgaattaatttaggcttttgagtttatggaccctggaaaggatgacctttgtgcttttattctcattcctactcacctttgatatcagaataactttatttggcttgtcaaaaaaagcatttcttttctagatattggaaggtagctcagatttcagaagaaaatgttaattaaaatatacttggatctttgatttttgtcttatctgcagatagacatcaacttttgagaaatggtcttagaaaatgaatattagctgggcgtgttggctcatgcctgtaatcccagcactttgggaggccaacgcgggtggatcacctgaggtcaggagttcgagaccagcctggctaacatggtgaaaccccatctctactaaaaatacaaaaactagccacacgtggtggcgcccacctgtagtcccagctactcgggaggctgagacaggagaattgcttgaacccaggaggcggtggttacagtgaactaagatcatgccattgcactccagcctgggcaacagagcgaggctttgtctcaaaaaaaaaaaaaaagaaaaaagaaaaagaaaatgaatattgatgaagcagctgtagaaaattgacctcttgcctcaagacaaataaaagtacatttcccagacattttcagctgcccgttttttcctgcctctgtaactgattctaatttgccctgcctgtccctctgaaacctcagaactttcaaattgctatttggtttgcagggtaggttgtaatgagagccacagcattccaagtgtgggctacatgcctgaatcatattagaacttcatttttttttttaaagttcttaattgtttcaacctatattcattgtaatattataaaaattatttccaaatgagagctggtgctcaagttggtgatttttttcccccagtacaaaattaacaattacacatgaatatcagatagtgaaaatcagattaaaaatgtttaggtaatccctcattctcccaataagacacttagtagaaaaaagtaagaaagaattatgcctttatgatggtctttgttctaagtatgttctggttgctaccaatacacatcaaaaatatgaactttggtgtataaatagtcgtagtttccccattttacaaacaaattggacacaactttgaagtattctgaaggagaggtcgtaggtattgcacctaatgtgggtaattctgtgtcagccaggcagcctactactgtgttcctgcacatgattctaaccctggaagctgtattgtctctgcttctcagctcccagccaagccctctgcacctctccagaaataaattgtgtgcagatagctctggagagagaagagcatggtgtggaggggattgtgcaatgtgatggccttttttaggtgacattatggaaaatattttcttagcaatgcacctgaggtcattttttaaacctttgtggagaacaagtgaaagttctgatcacaactgcagggcccttctgtttgcgggacagggacaaaacaagtcagaacttccagctgtgagtcacttcaatagctctggataccctcaactcttatctcttaatagtcctaattttagttctctgttcattcacttcttaaagcgaatgaacctcagggcagaaattgttcaaagtcatttgtttggtggaaggaatccttgtgtgctttatcagccacagagtcacaaaggaattttgttttcttaggatgagtccagtaagtggaaagtatctattttaagatactgataggaagggatgtggggaaagagaggagagatttttatctgtaatgttgaactcatatcacattttaggtcgtgaacctagcgagcatccatttgtagaagccagaagcaattgcaaaacttgcagagtctagggaatctggtatgacatatttattgtttgatttccctatgaaattaattacagtagtatctagaatagtcatcatatcaagttatgcgttacacttcttcctgttgggccctcattgatcttgaaccctttgtgcttagctcgctctggttatttttgttattgaattatgttttaaaataggccctcatatttaagtagtagaaatgtatcttgggagataaagtgagccctttttcaatctgtgtcttgagatttttgaggagggatgcacgggcctttcaagataattcccaacccactctcgacatctcctgtcttcccccatgctcatgctgccatgaaatagctccccctccaggccccctgccacttccgccagcctttatacccaacaggggctccacacaaggggtgcttcctgtttcatctcaatatgtcataatttgtagggaattgtcttcattataatcagattaagtatctcagtgtctcctctacatgtgagaggcttttttggtactttttgcatattcttggctgaatgaaaaccaattactaattatgtattagtctgagaacatagtgtttagggtgaatatatctgaattaattaagtgccattaataatgcctctcaggatttatgagcatattctttgcttgacttaaaaatgatataaattagtgaggtttattttttaaatgtcacactgtgagatggctttgtggggacacccctgtatgccgtaatttcagaaccgttaccagctgggtctcacttatttattccttgtccagtagctatttagtattcccatttttgcagcttaattgcaacctctcttttcctgccagtgtgaatttagtcttacatctgcaggagtgatactcattgcagtcagccagtctcacacgaaaaaacaaacctgtgtgttttgcagtgttggagggaacttgcatgtgatgtaaatgtcaatgccttgctcaggagaggaatcaaggtaccttttctgagttgggctatatagtaatttaaaaggaaaggcccacataaatgttactgtgttttgtgttaattatatttttcatgaaggaaactgagacaattggctttaataaataattggcttagaagtagattttacatccttcaaggatattgtgtatgattcattaagatttaatggagctttgaggagtatttattttcccttttttaaaatgacaagaaatgttagatgacaacttttcagtcacacagttctttccagatttacattgtgctattataccacagctggtgtaattgtagtagcccatggtacatattcagttaagtgtgtattttatcatctgccctaaacatgtacttaattactttttttttttaaataaggaatcttttagaagtttttttgaacacaatgaagacttaaatttcaggcagatatcttatgaagttgctaggaatcttatctcactggctgttaggaatttgaaagtatcttgggctcagccagtccagctccctgaattttatattccaggtaactcatgtgagttatgttggcagaagatttaagattggactgagttccaggtacagctctactgtttaatagcttgggccttttctaatctcactaagcctcaatttccttatctgtgtaatgggcatgataatagcacctctacccccttgggttgtaaagatcagataagatactgtgtgtggagtgcctcacgtgggtcttggcacatgtgcacctagcatgagccataaggttagtgccaagtgtggcagtgagttagggtaaagctgagccaagcctgaggagctctccccggcttcctccctctccctgccacatgtcagctccccctctgctctctcccctgcccccactcttgagtcataccataatcagggacattttggcgctctgcactagccctctccgccccgtttgaccctgtttctattgatgcagacaacaaagctgctttattttatgtcatctttggagccccagcatgggcagctttgatgcccaatggccgggcagcaaggcagtgcagacccacacctgcaatttgggggtgactggcacggcataaacaggaacaagaagtccggcataaacaggaacaagaagtcgctcccaggatgccctggggccccaggctccagccactctgtgtggggcggggaatttctaatacacttgttttacaggcctgtgagtgtgaccagcagtacagagagaactatactgtgtttgccaaaggggattgacaaccattaagtatttgacaaccattaagtgtaaagtgatattgctcttttgctgtgagaattttattgaatatttgcaacctgaaggaaccttaaaggtggcctgtatgtgatagtataactggtgctttcactttgttcagctaacctaagaaaattttaataaactcaaaaaccactttcatcttcatgaattaaaaactgtttggatttcacaatatatgcttattcctataaagggtgtatgattctttccttcaaaacagtaatggttaacacaaatctttctgtttcctttatgaacattatgtaacatatagatagaactatatgtgtgcgtgttcccaatataagtatcttagaaaagtgtcaattctttgtataaaaaatactgatgaaaggacaggtgggatggttcatgcctgtgattccaacactttgagaggctgaggcaagaggatctgttgagcccaggcaacatagcaagaccttgtcaccacaaaaaaatttttaaaattagccatgcatggtggtgtgcgcctgtagtcccagctctcagaagactgaggcaggaggactgcttgagcctgggagttcaagactgcagttggccatgatcatgcccctgcactccagcctgagcaaccctatcttttaaaaaaaaaatcctgataataagtgtaaaataatgatgataaaccactgttagttatcaattttagggtagatcatatagaatggttggtctaggtaggatgccaaactaataatttaaagttttctaaaactggagactttgaaacccaagaatctttattttgaaatctgaaagttcacagcccagagcgctatataaaatattgaagttaacaaataggattaactcagccttcttcaatctgggagctcattgccattacctgcatttgcaccaaaatttgaactagagacaagcaatatattttagtttgggtaagagcaaagtaacaggctaaaggagagagtttttcaggaagttaaatgtcttttcagttattaagcagctctgcaagtaatccatttcagtaaaactgacgaatgatcactaagcctcatatacaacacaataaaatgtgttgtagaaaaaataatatagaggctcatgggtacactattgaaaaaatagtttactaattaaaagcttctcttttaagtagtagatcctctgttttgtgaagtgtttgtttacaagtcattaaatctagctaccacctgacgaagaagttttctggggggaatccggaggggaaataaagccaaaagcaatgtgatgcaaatgtaaagaatgaaaggccacctggaagaaagataaagtagccataaagtagctgtcagatctaactcagtatcctgccgcactactcaattatgaaggtatagatactgctgtaccaggacatattacaatctgcaaaatgagaggttagactatatgatctccgaaattctcttttaatttcagcatcttatgattccatgtaaaccatttgatttttcttcttgtctcatttcttgtcttcttagataaagaggaccaaacattctctacctcttggggtagtctggttttggaagatggggaatagctaaaagtttgtgtttccctgacatttaaatgacacagtagtcagaactctccgtccctcaagggccatgtagggctgcactccttccaagaagcccgtcacccacacccgtgaccacgggctcctgctctgtgcttctgtggcacttgttgtctggcttcagcatttcttctgtgctgcttggtattttactacatgtgaaggtcttgcaccatcgactacagtggaaaactccttacagtcagggatcttgttttgtactgactttccatttccaagtgatggtcctggaactcctttcccctttatgtcacactcagccagcaaacaccctccatcctgaagaacgcctgtcatcctgtctctgcacctgcaccctggggttgagctctgccagaatgaggaatgtcatccacaagttcacttggttcctgtacgtgaaccatcacaaactgtggatgacgctcagctctgcccggaagcccagcctcctgtctctatttaaacttgtccatccacattctgcagtcccctttttaagctctctgtgttctctttaacctttgaagtcctcagcctgcttctcactcttagcaggtggccatggccctaatccccagagaaaataggagccagtggtcgggagccccatcttccctccatcagttctgctccctccccatgacacctatctcttttccctcctgtgaacaggaaagtcgcttccctcctcagagcctctccttcctgcatgcctgaatcccatcccctcccactttctcgagaagtgctacggaatgtcccttctctgtcaggtcctccctctgtccctcatccctcttcatctcgctcctgtccttccctgccaggctccttagaaatcagccctgtgcagtgccagcatttccttaactcaacttagtctgggttccattgctacactccaccgaaacaactctgccaaggttgccaaggacctcctgtgccgttcaatctggctgacatttcccagtccctgccttctcaaaagcatcatgatcatcccatagcatgtttgaacccccttttcccttcactcccattgggtgaccctgtgctttttcacttcctgcctcgatggcagttttcccctttctcatcctcttctccaggcttggaaacattcccgttcttgaagactgcttctccgccttcctccccatcacaccggcccctctccaggttacctcatccactcctctggggagctaatgtctgatgcacagatacacacatttttatctcttgcccctgatgcccctgggaacttcagacccacctgtccacggcctacctgacattgacacttagatgtcccaagagcgcatgaagtttaacaagctcaaaactgaactcttctcttaagatgcattgtgccagtcgttggacccaccagcttcccccgcatgcatgcagcattccctccatctttccctacatttctagtctgtcatcatcaagccccatagatttcagcacttcagcatgccggagtctctctgcttctttcgtttctgctgcctcctccgccctctgctgagctgctctcctctgtctggtgcaattctacagcagccgcttcccggtgctcctgggcctgctgttcatccctttcatgccacgcaccttgtctatttctgcactgttttcccattaacagtgtcccctcctctctaggactcgccttcttcctggaagccctgtccacctgccctctcctttctccacgagccattgctgcccagggaagcctcacatgcctcccccatctggcctgggccttttccatacttgctcgtagcccattgtgcttctccctcctgactctgtcattgttagagttcaacacttggggcagttcttcagttaatgtgtctgcccctctggaccataagccccaagaggacaaagactggtgtccgagctgtgcccagcacagagtggactcttaaaggttgtgctgacgcgaggatgggtggggaaggaaaatcaataaggaaaattctcagtttactcattccatgttggctgaagttttcatattttctccacaaaacatgttccagagcaggtaccataaagcaaaaggatgcagaaagtttctggtttcctgtttcctgtctgagaagactctcttaagtgatactgatttaagcagcctgaggaggcatcaaagctttggaggatctgctgaacacatcacgcgcatttaaataatcagtgtctgatcccacctccacgttgggtttcgctttctcttgttccacaagatatcgaagtgctgattgagttggcatccagcttcattcgcattgtgtttattatcacaagacttggatttccattatgattttctttttctgttatttttcaaactttgatattccactgatagcataaggatacataaactttaatttttcatagatatactctgggaatgacttagtatcataagatgcttgagtaaagtgaactggagaagctatatgacgttagattcctgtttttgttcagtgggtttgagaagctagctgtcagctgtcactatcattcctctgttgtgtttgccttttctctctggccaccattcctttcttctctttgcatttggccttctttagtttaactacagcgtatctaggtatgctttgagtattcttacttatatattgctttgagtattctgcttttttttgtttttttttttgttgttgtttgttttttgtttaacagacatggttccactctgtcacccaggctggagtgcagtggtacaatcacagctcactgcagccttgaaatcctggatacaagtgatcttccttcatcagcctcctaagtagctgggactacaggtgcacaccaccacgcccagctaacttttgttatttttttatttgttagacacgaattctgttgcctaggctggtctcaaagtcctgggctcaagcagtcctcctgcctcagcctcccaaattgctgggattacatatatgagctgctgtgcccaactgtatctacagatttataacgtgcattaattgtggaaaattctgaatcattattttttcaaatataatcatcttttgttcatcttctatttctgtataatttctcacagcttaaaaaattctatatctgatcatcttagtaactaaagtcttgaaaatattaattagtcgttgctgtctctgtgagctcatgtttgattgatcttcatctgtgggaagcctggaggcctggcaggggttgctctcctccggagatcatttacatttacttccaccaggtgttggggccactttcaaaggcttccttcaaggatctcaggttaacgttgaagcctttgttgagctcccagctttcgtttggcccaagtaagtgttgaaactggcatttgtcctcggagtccctcctttcaggcttgcttaatggtccccacactccctgtggattaaactcactttgggggaagaaaggtgtcttggagattgcctctactgtctgtgaacccagcaatgtgattaaaaaaaacaaatagctctatcaagcagctcattcttttgttgtttgcttgttttgtttttgtaactgagaatccttcagcgtacctgccttctatcctactggaagcataaatctttgacatggtttttattgctagcaacaaggaaagtcaacatgcaaaaatagttaaccaagagaaagttcaggtttttcaaaattgtgtccaaagctgtccctttcattcactggaacttgatcttaccctttgtcctttggaaacacatctttgcttttgttcttgactcatgtccaacccacctccttctcttgtagtcctgggaccacgtgtcttcttccttccctgaatggaggttcttcttttggtaaattcatgccccaccccaatctttatttttaaacttagttcctgtaagggaagtaaagagcacacagatgagttcaatatataaatcacgtccattaatccaacaaatatttacatgaaaaatttaaaagctttctttctcagataacattttctttacagaaggaagttgtcctggacatgtgaccaaagggtctgtgggatgaggttgtggagggaaggtagggagagtggatgggcaagaagcagggacaggtggcatgaggattgactctccctcaccactgccgtccggtggccaccatggacccagcatcagacagacataagaagtgggaatgaggaaggcaggaagagagattatgatggcagagggaaggagggtgggttggtgggtgggaagagaagttcctgtgtccaccatgttttttttcccaaggtacacattcaagtcaagtcctcctcacctggatagtaataacccatgctatttattttatatttttccagatcaatgaactgagccatgttcaaatccctgttatgttgatgccagatgacttcaaagcctattcaaaaataaaggtggacaatcacctttttaacaagtaagtacaagtatgacctttcataagactagcgtggctgctaggagtacaagttttgtgaatttttgtaatcacataatttgtcaatgggtgggagtaaagttttgctgatgaagttaatcctgtgataaacataaccatctgtcatttttagagaagcaacagcaggctctctgggataatatcctttgccatatggcatattgttctctatgaatatcttatacgttgaaagtgatattctcattataattcaaatttttgaagctgtaaattgcttggatttttgagcagttatgaacctctgctcttgtacacagaactttgaaaatgatgatttatgaacagcaatgactccatcttagaacaataaagacccaaggtacattttcataaggcacaattagatgccatgttgggcattgataacattcctccttcatttgaatgttgttttagacgtcattatgaagcacctattatatgttaggtggtccattgagagctagagatgcaatgatatagaagacacggccctgccctcaaggggctcagagtacaaaaactgacacatatacaaactgctatagttcagtgtgcaaagtatgataagggaggggtgtgtgcatatgtataatttaatttatctggttgtgtgggaacacaaagagggaaacaattctgaatgattagggtgaacctcaaatcactcccatgtgaggatcattatgaaatttttttttgagacaggatcttgctctgttgctcaggctggtgtgcagtggtgaaattatatctcactgcagtctcaaattcctggggtcaagcaatcccccttcctgagccttctgaatagctgggactacgggtgcaggttaccatgcccagctgattttttaaaaaactttttgtaaagacaggggtctcactatgttccccaggctggcctcaaactcctggcctcaagaaatcctcccacctcagtctcccaaagtgctgggattacaaatgagtggtgtaagccaccatgccaggccaattatgaaatttcttcagggggccattgtccttatgtgaagctgatgttaatttttctcataacagtgtttagaagctgactttcagggaatttcctctaagcaaatttagaatgtggcatttatataaaacaggccttttaggggggtgagggagtggccctcctttcctcagcagtagctgagagggaaccttgctccgctgcctcttcctaactcactctcccgccattgtgcttttccctcactgctccccctgcctggcccgttccttccccacctcttgttctttgaggaatggctgcagtgtgtggccaggatttaaagaggtcacatagtccaagcgtgcctgtgacaaaggagacagacagacatccgtctggccccctgtgtctcctggatctttctgcgggttgtacctggttctaggaagcacacctgtgcttttggtaggcagtgaactctgaacccttctttggctacctgtggaactcagtggtggcagatgcaagtctgattgactctctctgagctttattccacgctgtgactgtttcagagaaaacatgccgagccatttcaagtttaaggaatactgcccgatggtcttccgtaacctgcgggagaggtttggaattgatgatcaagatttccaggtgagttgcgtttgtaacatttgcttccagtaggaaatgggttttgccatgacttttgctgtgtcaattgggatctgtatttttgtcaataaaagtattatataatagtaattttcattttgtgtaagaagtttttaatgttcatgctgaagtaaagtgttctcttgattggggacctctatacatatgataccggtataaaagtcagtaggaaaatatattacttttctttggaaggagactgagcatgtgagggttttatataatactctcatttccaggtggaaattaacaggctagcagagctgcctgttaatttctgctgtcagacatgtcagtagcctgtgtgagtgtgcatgttttgtatcttcgtagaggctacttaggactctcaggaatctttatcttgctgatttgctgcttttcaagttggtcagactcttgctgcagcatttttgtcaaagggcaccctttgtgcactgcagtgctggactgtggagtgaccatagcactgtggtcagcaccaggaacccaacatcctgggcgtgtcctgtggtacatcttcctcttcatcttgattcccaccacgtaaaaatgtgcactgctgctctcctccccacactggcctggtccttcattctaacttttaaacatctgttttaactctttaaataactgttgagccatgatcatttttttctgagaaaggatttgacattggttacccaagtttcatatagcgagccagattcgtaaatgctaaggattttttttaaaagtggaaatccaagggacaggttgagtatcccaatcagaaaatctgaaatccaaaatgcttccaaatcgaatattttctgatcatcaacgtgatgccacaagtggaaaattccacagttaagtgctcaacacagcctttgtttcatgtacacaattatttaaaatattgtataaaattacctttaggctatgtgtataaggtgtatatgaaatagataaatttcgtgtttagacttgggtcccatccccgagatatctcattatctttgcaaatattctgaaatctgaaaaaatctgaaatacgactggctgcaggcatttcaaataaaggatgctcaacatatactgacttaagtcccttcaaatctagtcctaatctgccctcaatttaagatctgaatttatcctgcattaagtgacatattgccaccctgggtgactacagattgagtactgatacagcttaccctgtattttcctctgaagaatagggtccctcaggcaaactgagatagttagcacactttcctaaagatctgtgctcccactgccctctctgtaccattgccaaaaatttccaggaatttttcatatgtttactcaggcatgagagaggctgccatgtttggagaaagcagcgctgaccaggctgccggtgacattgtctcatgatggcctggggttgtggtttacatggaggtccagaccctgagctgaggctctgtgtacacagaagagctgagggctggctagtgggacaggaaggatgtggttgctcatctgctattaaaactgcgtgggagccaacactcctgttagggcgtttctttttttttcttgatacaaggtcttgctctgttgcccaggctggagtacagtggtgtgatcatagctcactgcagcctcaaactgctgggctcaagtgatcctccgacctcagcgtccagagtagctaggactacaggtgtgcaccaccatgcccagctaattttttttttttttttttggtagagattggggtctcactatgttacccaggctggtctcaaactcctggcctcaagccgtcctcccagagcatgagccagtgcacctggccttggggcttaatttttaagagagaacttagatcacaattatggacttgaaatttactgctgtaaaaataattaactttaacagaaaattattagaatagtaaaaagcatttctctgaagttaaaattaataattctgtatcactttagaaccattactaaatttaaagaggccacctgaaaatgaactaggtgcttttttttttttttaaaggaattaacagcagatagcttcagtgtcttaagaaaatctcctctgccttaagaaaagctgaacaccagtgtgttcctccttctctccacgtcctttttttgtttggctgggttttgttttaataaaacaattccactggcatttcacagaaactgacttttgagggcccatgcatctatcttatcttgttagattcctcaattcattattgaaatgaagtctttctatttcttgtcataatcaattctgtcaaatgagatccaaaatgaacccattacggtctgagttctgcactgcagcagagaaaagtagtttttaaaatttcctcaaatgaccaatttagttgctgaaatgcaaagacatgaactggttttccttccctttttttcgccctacaaagaaaactacgtaagttgatattgaagtcagtacaaattgctgagtacaaactttgaaagaaaattaggcaagtggaggatgattcacaagtaactaattggcaagtccgttaaactcttcacatgagagctccctgttggggagagtggtgtgagtgtgattaatcattcgaacactcctcctttccttagctctgcctgctgctttctctttggcaactgtatttctattaaaaaaagaaaaaaaagaaagaaaaagtgtgtattcagagtcacttcagtactgcagaggtatactcttcttccctcctcagtcgtatatttctttcccagtgtctgtacctcttaaaattcttcagtagggtcagggaccctgagttccagctgaaaacaggatcgtaaatctggggctgtatcccagtcttttggctacttggtttggaagaaaggagggtcgttgtgacagctctggctccagggtcacctcgcaggcccctgtatactgcagggattcaggcggcaggcgggcaggggccaggacctggggcttcagctgcctggcacattgttactgcccagacagttcaatcctcatgcccagttcaagtaacaggtatcatttggcacatgtggcgccaaatgactaaaagcaaccttgttttcctctcctggagcttgccaatgtgcctttgctgagtagagtctcccaccggccgcctctgtcactcctgggtactggctgctgaagactgcgtatatcggaaaaaaaccaactctctttctgagcttatcaatgtgagctgctttttgaatactctttcccaactgacttggaaagtaggatcagtgacctaggctctcatagtgttttggaggacactggatagctgaaggggaacaggcattgcctgctgtgtttatttttccaaactgcttgcattttggacaagcggctctaaatcaatgtggtggttaggggctccatcgtctggtttatctcgtattcagacctttccattcagccaagtgggtaaatggtcccgacttgtcttgtttgtgtgaccacctttttgctacacctgaaaaaagtaggtattggtctgtggagaccactctgattaaagtagagcatggttaagtagtaacctatgcagttgacccctactggtgaatttaaacttcttaaaaagtttttaagataaatgaaaaggataatgaaatgaaaaatgaaaacattcctgctttctcagtaaacatttgtatctttcctctggttttgatttctggaatatcttttaaaaatgacttttccttgttgttaaagacaaattcaaagaacaattctagaatatccattgttaataacagtaccacagtaccatgtaacatacatatgtaaacctctgtgtgtgtgtgtgtgtgtgtgtgtgcgtgcgcgcgtgtgtgctcgcgcatgtgtgtaaccagtgcttctagattcagaactttttccaattcattagggcatttttaaattgcatgataggtttgtaatatgctcagggttgaatcagtgtgtcatcaaggttctgatcattgtttggccagcatgatatccatcgtcatactttaaaggtgtgtttcaggatgaatgctgcctgggaggcctgttctgtgactatagccgcagtcctgtgtctaccattaccactgcccccttaaaccctgatcaccctgaggtctgggatttcatgcataattatccagtcaaagtatttgtttgtacctaccacatgtcaggctctgtgctagccgttttagggaatgcagagagaagaaagggtgaagcatcactttctttaaaaactattgcataccagattctgtattagatgctaacgagatttacagaaacccagcatcttgatttgtaatgttcttcatgaaaatctgcacccctctttccagtctcttatactcatttgatggtctcttatgtttatacccagagagactggacaagcacggatgcagattttcatgaagaacattaaacagccctgggaagtcaaacggaggcttcagttacatttagtagctgccagagagggttgcctcccagaaaccaaaaagttatgcaggagggagctgatgctgttaaacctaaatagaccacacatttgaaagtgaggcctcttgttcactgtggaggataataccaggtttgcttttcccctaccgtgactcctgaattagaatccctcattattgacatctgatgccctttcttctttgtgtttgtaacagagaattctaattttaaaataattaattttaagagctaacattttaaacttttgatattcttatttcaagtttagaaataaaattctaaagtgttaagaccttcagtgtatactaaacttgaagtggggcagcaggaattctgcctttatctctagaatatcaagtctatcctctgaaactttcacttgtagatttctcacttttgactttaaactgcctgagggcaggagcagtgtttgtgtttgctggctgcctgtcacccgttgagcacaatgctgggctcagcaggcacttaagaaatatttgcagtcaggacagtggccacacctgtaatcccagctactcaggtggccagtgcaggaggatctcttgagcccaggagttcgagaccagcctgggcaacacagtgagacaccatctctaaaaacatgaaaaataaataagtaaataagaaatacttgtgaaagagagtgagggctaatggggactttgaagagaagtgaactctctgggcccaagcggaaggcaggagagcccatgaaatgtgaaggtatttggatggtggcagaatagtgggagataaagatgttaaaatagcaagaaacacaaagacaccagggacactgggccgattctgctgccagcgagcagccctgtgggttttgctcaggggaatggcaatgtcatgacatctgtattttcttttcttttcttttttctttttctttctttcttttcttttcttttctttttttttttttatagacagagtttcactctgttgcccaggctggagtacagtggcacaatcttggctcactgcagcctcccaactcctgggctcaatcgatcctgccacttcagccccctgagtacctgggactacaggtatgtgccactatgcccagctaagttttgtaatttttgaagacacagggttttgccatgttgcccaggctggtctcgaactcctgggctcaagcgatccacccaccttagcctcccaaagtactgggattacagatgtgagccactgcacccacccgaggtctgtattttctaaagataactgcattgtaatttatagaatgcatagaagggagataaggaaatcaggagaccatgaaatcccagtgagccaagcctccgtcacccaccatgtaaagcacggagcagcttgaaaagacattgagagaagtaaacccacaggttcagtggccagtggcaaaggacaagagccacagaggcactgggacctgaaagctaagagagcagggatgcgggtcacagagggagggatgtttggggctacaggtggatagaaaggaagatggagttgagtttttgacctgttgacttaccgtagtggtaggatacctggtgaggcttgtggcctgcattgggcattctgggtcacaactctgaatgaggttggagcagaggtccagctgtggtgaggattggcacagtcgtgcttgtgggactcctccttggtccaactctaatgctcaacctacaccatcacccctgtgcttgctcctctaatgcctaagcactgtcattcctttatcactagtagttgcctgttgggtttgctccatttgtcctcacagtttagctgccctggaaggaaactccaccctgctcagagacacactgaggctgagacccaagggaggcccctctctgattggacagcctcttgatagactgggggaagctccctcacagcccatcagggtcagcaggcatttcttgcactgtttcaagtcctgtttatgaactgagcaaattactgttcctaccaccacctgcccccacctgggaccccaggcttcctgttagcctgtgtttcccgcctcaaacctgctttgggttttgcctcgtggcttttgacagagagctgacagccagtcatccttgctactgggtgcttctctccaggttaaacgctgtgtttaccgtgagccttggggacatgttcctggtttttttttttttttttttttttttttttttttttgagacagtctcgctctgttgcccaggctgggtccctggtgttttaatcatcgtgaaacagcagctgagatttagaagatgatctcatggcactctgtgaagtttctgcaactctgttgctttctctgttggtcattgcctttcatttttatattctttttttctgataagttgtttcattattgataagtgttaaattgcactgtgtcttgctcccctctataatgaaagctattcttcgcttgagatcacagcttagattttctttgaaattccccaagagcttaacacagggctttgaacacagtgggcatttaataaatccttgatgatgatgttcaagttccacattggtcttcaactctctggcggggtcagaggaccatctgtgctcgctcagatatgtcaactgcagacccagaaagcagccttctccagacaagttgctcctgtctcctgggccgtgtgattcgaggcatgtaatcataatcctgagctgtcagcagggcagtgattggtttccagatttcaagtccatgaaacaggtagccagggttggggaaaagaatatttccgggaagttaggaggcctggttgagtcttggatcttcagtgactgatgctgtgaccatgagatactcactcacccctggtgggtctcagtttcctcatccataacatgaggagagggacacagtgctctctccggccccccagctgtcaggtctctaaatctattactgtgccaccgtgaggagatggctgtcacgtgagttctgcacggtattggcatgttcccttatacgagggtggctttacacatttgagcatggcaaagtttaagtggcccctctttcaaccaaaaatgaaaacttttcatacatgatttttagcagaatgtatacaaacgaccatcaaaatggaaaaaaaaaacaaattatacaagacttacgtgattagttcaagagaattaaatatgcaaaatgcttggttgtttaaaaaatgcagggaaaagtaactgttactaaatgaggacacttttatgagagagagaaaagattggcggtaagaatgagctaattaaattgacatttatgtttccttcccccttctgggggctccactaatcctggacctccgactgcggaaataaacatcttcagcgcagacgtttagaggaagggggaaaggacagcatcgttaatccttttcttaagggaaaggacaataaatttccagttataaatgtaaaaaggcattacagagggagcttcatctatcattgccttcctttatttgctgttgagaggaccgagatagcaccagagcctcaaacagcttttgtggtttgagctaggatagtgtaaggtaggaaaggtatttggctatgggaaaagtacatttattcaccacgttgcaaaataggcgaaaatgaactaaattgtcatactcttacctgccctgcatcatacagctttgccctagaacttgaatgtttgtccaactgttcgtttttctctagctccctatgctaggagcaaacttagaagcaacatttattggctgtgatgtgtccactgcaatcgtgtatgggtgctggcctgagtagagagcacttgccaggtcacctcactcatccagagacagcctcatggtggatgagtgtgtctaggctagggcacttgaaagatcaatgtttgggccagtcacaaacacctgtgtaatgtatggttacatccatatgaaatgtccagaatgggcagatatatagagacaaagatcagtggcctttctaggctgggggataggggaaggaatgggagtgattgcagataggttcaggtttctttttggagtcatgaaaatgctctaaaaatgattgtggtcatggttgcatgatttggtgaaaacattaaaaactgttgagttgtatactttaaataggtgagtcatatgatatgtgagtcatatctcaaggaagaagaatgcttggagtttgaaactcgtttaatttattcagtaagagacgttttttcccaaaaggttgaaactagtttaatttattcgataagagacagtttttcccaaagttgattttggctgttgttttttttttgggatgggttatggtatcagtatttttatttagaacaggtgactttaactaatttcgtaatttataatatgaaactatcaaatgtatagaaagaagaaaaggaatagccaatgaagaaagtgtatttttgcagtttgtgcatgttgattattagatttttttcccataaactaatagtaaatcatcgtccattccctaagtctctacaaactgacagcagaataataattagaagaatgagcaggaagcttagagaccattaagtccagctgtctttctttgcagataatcagataacagagtaagggaggtgggaagggtgagttggagggaggacgcaaagccctgacttcagcccattgctgttgagatggatcaccctgacactctgaggctgcttcctgggtccattctgttttgtcgtcatctatgtcctttgcccatgtctggtttgagaggtcacagggaagtgagcaggggccagcaatagaaggaagaccttgtgggctgggaattttcaatctgaaacttccttgtgaaattttaaattctccttttaacatgtaagttattattgaggcctttaggaaataacttactgtcacttttgaactgataggtgcagaatccccaattttgtctgtttgtttttattttttaacagagtctctgtctgtcaactaggctggagtgcagtggtacaatcatggctcgctgcagcctcgaactcctcagctcaagtgatcctccaacctcagccttccttatagctagaactacaagcacgcaccaccacatccggctaattttttaatgctatgtagacacagagccttactatgctgcccaggctggtcccaaactcctggcctcaagtgatcttcccacctcagcctccaaaagtgctaggattacaggcattagccactgtgcccagcccccaattttgaatttaaataatgtcactttattgcagaccatataactctccaagtgtgtccatgacaaggaatttgatttttaatgagagtagatctctccaaagcctgggtggatttcactgggtaattttatctggctgctttctcctgaagacagacaggtagataagggtaagtgttccagaaagtgaatattttactttggagatgaagaggactaaaccagccctctaaagggtgtttttaaggccttaggtaggatcagcttcatctcagatttgcccttttaaattaggtgattgagaagagaaagaatttttctaaatggtgtcttctgctaggcttttttttttccatgcagagctggtcttaacttgcaaatttcatcttaatttctttttttcccttctcgttttttttaatcctcccagcttagtagtatagagagtgcatatagaatatagagtaacccagaattcagcactcccagtataaaagattgctcctttcaactttggcattctttgtgaagaaaatctgtggagttgtaagcagagaaagtggatgggacagtcttctaaaggcagaaaccagtgacaggaggaaaacaagaacctccgacaattctcagaccacataaactaatttaaatagacatgatgcagtgtgccacatggtcagaaatgtgaagaattcttagggttgacatcgtcaccacagtcaacaggactcacaggaaatgctaagtgctggtcctccttcagccctgtgttacgctgtgtgagtgcctgactctgggcccagggctcagcagcacggtcttcctgtcccaaaggcttattccacaaacacatctgtctcagctcctgcgtggagagaagacagctcctactcttcctactcagttaatgtaaagtaatgaacagtcctagaatgagttcagatagctttgtacacatgttaataaaagtgtaaataacagactccggactgcattagcactgtggctgttactgatattttctacacactttacttggcaaaatcgaaaacctgaagacaggtttggttttgtgccagctggctcacactctaaattggcattagaaggtgtatgtcactatagaaaaatgactgtcccttcataatgcccaccatactctggagcccaggcagggaagcagcacggcagggggagatggaggctctgggcagggcccctgcagggccctccatgtacaccagcccacctgatgttggagaactgagttgggcaagtcatttctgctctctgggtctgttttcttatctgtatattgagtggtttggaatcatctccaaggttgcttccaactctaatgctctttgaggtttatttatacatggagggacccctcgggggcacctgaaggtcactcccaagctctgtttccatcaagggcctcccaacttgtccaagcatccaacatcatgctgtgattcctttttcctttgcaacaaaacaaagcacactgaggagtttcttattcagtgtcagtagatagactgttttgaggcagcacagtgactgtgttgaagatataagacctccttccctgagctcatgtgctcgttctagctgacgttgtcctgaatacatctggaatctgtgaagtgttattttcactgcatgttctctttcatctcagcccaggtgtcctaaaccatcattaggcccctgctgagatgatggttgtactgtcttctgatcggactctgtttcttgggacggttgtcctgagtcaccttccgaggcccatgctttacagcatttcctagagcaacgagtcgagtcttcgagtaaatccttttttttttttttttttttgagacggagttttgctcttgttgcccaggctggagtgcaatggcacaatctcagctcactgcagcctccgcctcccaggttcaagcgattctcctgcctcagcctcccgagtagctgggattacaggcatgccccaccacgcctgcataattttgtatttttagtagagacggggcttctccatgttggtcaggctagtctcgaactcccagcctcaggtgatctgcccgccttggcctcccaaagtgctgggattacaggcgtgccccactgcgcccggctgagtaaatccatttttagagtcataaaagatccaaggtagaggtctaattcagcctgttctctccccaagcttattttccatcacttcatagacccggaaactaaggctcaaagagactaaatgcaatctacaagaactgatgaatgttctagatctcagaccagtgccctcaccattaccctgtgctgctcaggttggagtgcagtggtgtgatctcggctcattgcaatctctgcctcccaggttcaaacaattctcgtgcctcagcctcccaagtagctggaattacaggcatgcaccaccacacctggctgatttttgtatttttagtggagaccgggtttcaccacgttgcccaggctggtctcgaactcctggcctcaagtgatccgcccacctcagcccccaaagcgctgagactacaggcatgagccactgtgctgcctttaaaaacacatgtctgctgcatgccttggaagaaggcaagaaagtaaatgataataaaaatacataaacaattttactttattttaaaggctacaaaaagtctatgattatgatgacagaagtttagtcttatctttgtaaatcgccctttttggttagttcatagaaagctttagacaggaatcttaggcacattgcttggctccattgtacactagtttctttatcttgaggtgggaaaaatggatctagcttttcctctctcacaggaatattgtgaaaataaatatgaaataatgagttggatttttccaggccttagaatcattccaaggatcaggcgttttgtatagaattgcatgaactcttttgatttcctccttatcagataaggcttttaatacacttgatttatgtatttttatattcatagtgatatgaaaggtacattctatgttttgacacagtgttcctaacttcattggttatttcatgttcatgaaccttaaaaatattcagatagtgtgggttggggctactcacgtggattattaaaatggtgatttgagacagaatcaagattcgaatttttaaggttttatatcccagggtgaagacatggctgatatcctaatccagtgtctgcatatatgattatagtaatgcctttgaaattgaaagaaaaggcacaaactggggaagaggtagtatctgagctaaggagttcctacattatttgcttttacgtttccagccctttataaacccatatgttgcgctgggcatggtggctcatgcctgtaatcccagcactttgggaggccaaggcaggcagatagatcacttgaggccaggagttcgagatcaccctggccagaatggcaaaaccctgtctctactaaaaataaaaaaattagctgggcatggtggcacatgcctataatcccagctactcaggaggcagaggcacgagaatcacttgagtccaggagatcaaggctgcagtgagccaagatcgcaccactgtactccagcctgggcaacacagtgagaacctgtctcaaaaaataaaaataaaaaaccctgtacattgtcctggtactggtacatagtattattaaacccttctttaattagtaaagtaaatgccatgaattattattctgaactataaagtttcccattttaatcgaactagaggtgtagagaatataatgggaaaggcatgagtgccggtaagtctgtaattataatgtacttaatacgctagactttacgtgctgcatgccagtaaaacacagggtaaacaccattctgtagaccttggttctcatgtgtggtctgcagacccactccagcagcagcatctacttctgaaaatgccccacccctgacctgctggatcagaatctgcattttcacatgatccctgggtgattcagttgcttgttaagtttgagatgcactgactatgcagcttttgattcaccctattggcccatgagaggacgttatactgtcctatctaatgtgcataagaaaacgatctatgaaactgaggctgctggaattctatcctgtgctgaatacagttctcctttactattccccatcccccaaaagttgttttacacgtattgtcagtttgacagagtttaaggtctgttccacttggtctgctccacctggctttcataaacttgattgttcccactttgattttatgcccaaagataatctgcaatcttacagttcctagagttcttgttttatttgaaagaaatacccttttgcaaattagtgattgcaagaaaaaagtaagaccactaacaaagagcaataattgctttttgggggctagcatttaaaaccccacaaggggaaattcactttgattttcttcctttttgttctaagtgggaagtagtataaaggagatcttgttcatgttttaggaaagaaaaatgtaattaagaattaaactcttgttaatgtaggcattttcatcctgaaagtcatttttatcattctcagtctatctaataaattttagttgtcttaagaataactgaacactgccaagtcttgctatttaaagtcattggggattatgtagatttttttttttccttctctcaagttttctaataagctaaggaaagcaaattcagttacttggtggcctggactctgcatctggcaggtgcgcctgcttgccttcagatcaaggtgtgctattgcagaacgtgtgatccaccacaggggatgccagggtggtgaggtgagaatcctggaagatgaagatttgctcatgggccacttttctcttcaggcataggtagggcctgcgtaaacccctgcactgctgcaattgattctacctcaggtggttcagtcctgttgatttcatctagaaaggaaggaaaggataaagagactggaatatactagacagaaaggcactctttcttttgcaaattcatgggcagagctatctatcacctgcccctctgaaggtatctgtgttcccttaacttgacagcatttggccactgaggcctttgaatgcccacttcagagagcaagttaaagagagaaagcatgtttgcctttgaatcccacacaggccatcccgcagggccaggcaaggagtgaaagtcactgctcaggagcagtcggcaaggatggagacgagactttctgggggccaggggtttgctagaccccatggctggacggccattgtcaagaggttggggcaaggaggaggcttcttggaggatgtaagaaagaggagatctgaacggaagagtcacatgggaggagaagggtagacctacctagccagtgtcactagcatgaaccagatcttggagtgaatgatgtcagcagagcccctactcagagcccgtccttgtccaccctccaggagatcagtagttctcaaaaatggtggtagggagtggaggatggaccaaattcaaatcgcctaaggaggagctgttttagaagacactctcccaggctcctgcctcctcctcctggggcacacaggtagcatagtctgcaagttaagtactttactagttgagtagtttactagttgagagtttggattctgagccagccacactggagtcagaattctagctcttcccttattagctatatgccctttgcccagatactaagcctctcttattcccatctcctcatctgtaaaatagtgatgatagcaatcgtaaccattgcatgggaatgttatcagaattgggggaaataatctgtgcaaaatgcttggcacgatacctgtcatataaggaaatgctcagtgactgtaaaattttcttttatgactggaacctaattttattcagaagaaaactttgagagcttgtccaactctgaaaagaactaagtgattaaagttactttgattataattctagacattagcctgctttaaagatattagaatcatagtacaattcaagctgttttcatttcatctgaaaggcttgcaatgtgagttatgatgcatgtaaaaatgttgtcatcctacttatcaatttatcccacacacaaatgtttttgaaaacttgcaatgatgacaaattatctgggaatcggaaagccacacctttaactagttatcttcccccgccttccttcccctcttaccccacccgggaagaattccctgaccaggagcgcacccctccccaacgactcccaggcccgcagtggagctcgttttcacacttcctacgacaaaagatacatcatcaagactattaccagtgaagacgtggccgaaatgcacaacatcctgaagaaataccaccaggtaatttttcttgatctttatttgaaactccaagaagattaacatgcgtagcgatttctcaccaaggccagagatttaaatatatagttagagaacaagaagaacacatttcacataaacatctcctctaaccctgtgttctaaaattacagtggccagattcctggcagttaacctttaggcatgcttgtgctataaaggtcattcattatttgtataacacttttaacctaaatactcttgtgtaatagtttcagttatcactactctgattttaaaatcattcagcttaagatttggcaactttgcagaagtttttgcctgtgccagagattaggtgttgacctctgagtatgtatctatttacacctccgaatcctattttgctgtcactggttcttctgtcctggccccagcagggcccacgccattcacaatctgctacggagcaagctctctgattttagaaggtgggtgttggtctgcttcttgcccccttttcatccccgagcataattccattgtaatcactggaggtaaagtagaccatccttgggagcagcaatctgtctctcctggagtaaattccagcacaagcttctctggtagagcacatgttcccaaggcccagcccgcgctgtgagaggcctccttcaccatggagtataagagcatgaagtccagcgttggacaatcctgggctcaaatcccagccaggtcgcttactaagcatgtgacttctggtcttggttgttttttagagacagggtcttgctctgttgccaggttgaagtgcagtggcgtgatcacagctcactgcatgctcaacctcctgggctcaagcagtcctcccaccccagcctcccaagtagctgggaccacaggtatgcaccaccatgcctggccaatttttttaagttgtgtttttatagaggtggagttttgctatgttgcccaggctggtcttgaactcttgggctcaagcagttctcccatcttggcctcccaaagtgctaaggttacaggtgtgagcctccataccctgcctggattttgaagccacagtttctttgtttatacagtcgggataataataacacctaatatggattctaaagattaaataggaaattgcatgtcaagtgcttagcacagtgtctgtcacacactagatactcaatgtgtggtggtggccatagcatcgctattatcaagataacatccatggtataaaaataacgtaacaactaagtcacttggagaaattgtagtcatatggtatgaacatgtctgctgttgcaacatcccaggaatcatcttcacaactggtgtttaaaacacatacacacattgttgcttttaggaccttagtcagcttgagctgtcataaaaaaccgtagactgggtagcttaaatgacagaaatctatttcttacagttctagaggttgaagtctgagatcaaggtgccagtatggtcaggttcttcctggtttgcagacagccagcttctcactgtagcctcacgtgtgttggcagggtcatggtgggtgggataggatcaaaagcactcttctgtcacttctaataagggcactgatcacataatgagggctctaagctcatgacctaattagctctcaaaggtcccacctcctaataccatcacttggggattagggtttcaacgtaagcattttgggggacacaaactttccattcatagcagagtcacacggtgtttttaacttaaatagctcccaatcccccaaaggtaaaaattggctgtcacaatgggtattcaaaataaagtgccgcaggtcctgaatatattaataaaaggattctcgagtataaacaatcacacttactaagtatctgcttcgaaggcagcactggcctggacttgtgagctcctagatgtctgtttaaacatccctttaaaagcattactttatgttcatgcatgatgctctaatatcatggattctttcttggcagttgcttattcttccaatctttgcaaatatgatcaattgcattttgcttgcagtgaagtctataaaaatctttgagctatattctgtttcttgaaacttggtactgcctctagtttgttttctaaaatcattagcctctaaattcatttaatatctaataaatcttttataatatctattccttttgaaatttgttctacactgcttatgctactgcctcttattctacaggaaattttaaagtgccaggatgctacctgtgagggggaagacatgaggctctgttatctgaatgaattgaattacaggttgcagctttgaactcttcaccttttaaactgtctactttttcattttttcccctctggaaattgatatcatacttatgcattctctttatactttctttcagttgtctcagaacattcaaagcgaagtgatatctcatgactgatgagagcatattgttctaaaaaatggccatgataccatgctaataaaatgtgacacagaattgaagtaccaacttcttgatgacaactttgagtttagcatcctttgactttacaaaaatcacgatttgaaatgttttctctgggttagttattgtaacctaacatagggatttgacatatccccagtgttacataaaataagtgtgggatcaaaataagtctattgacacctcccaggggctttaacagtataaagacttccttctgttccactgctacaaaattgttatcttattggtgagttctttattcagaaaagtctcctttatccaacatctatactttttctttttataaacagaatattttaaatataatttgtagggtcttaatgattgggaatcacattattaatataaattatttaaagggcactaagtagaagtcaggagacatagatcctaacctgttaggaactgcctcttggatgatctctgaactcagcttctgcacctgcatttcattcattcattcatttattcatgtattcactcttgaccttattccagaaaggatttaaggtggccttcaaagaagttggaaatacaagctagaataaatgaaaaaaagaaaaggaagaggcagaaagataaaggcacaaaatggagcctggaatgagcgtagatattcatgccaagatgaccagcatgcttgatactttgagtctgttgccaaggagaaatgtaagtggtcttggtactaagatgcaacagggttgactctaaggagttccccacagagcggacacagggacatctgacctgataaaacaacatccttgccacaagctgagaaacatacaagaatgttagagaacttaaaaaaaaattgtccgtataggctgctaattatcagtataggccatgtataaatacagccacagttgcagcaccgttttgctaatttgtccatttttaaattacatttaaacaaaagcaaattaagaacaaggaaatgtataggtgacacaaacgttgaccattaaaggtggacatgccactcatatacatctcagcaaaatctcacatagaagaggtttttaaaaatacagcagcagtgaagagtaacagtgttaattacatgatcagagaattccacagaaacctcataaaaggtctcaacattcacacagcttatttgatactgatctattcggggtgacccctgctaggctcactgagggcaggtctgggaccctgctcaggttggcaggtgttcatgaaggaagatgcagtccgccgagtcaaacatcacacccgcagcaattagcaaaggccacaccagtgtgtagtttacatttagtaaatgctgttctacagagaaaggctataatgcacaccggctgcctagccctctcccattctggcttctgtttgaatgttcttcaggctgttcttcttgtatgccacttccagacgagattttgatgaatattactgggtggtgggctcagcctggcatgtcctcatgtgattctgtgtgaccagacacaggcctgtcattggtaaacccagggaggcctgtcaagctttgtgtttctatccctgtggtttgagatgctcagaggtatttgaggtatatgtcaggccttcattcctactttctgtgggcctagagtacttttagggtttgtatctaagaaactttctctctctagcttcagtagtgatcatcatttcttctgtttcttcttgcttgttgttgcttttgccttggaactctctgggcttctgaaccttccgaatctagacaagtaatgcagatcgttcaggtgcatatcagttgatgagaggctctcatagagggtttctcccgtggagtgaattgcatggactttctgacaactttggttacccaacagcccttttttttttcttttcctttgttgttttttgttttaaggaaatgcagccacagttggaattatattctggagggttaaaattgcccaaggccagcctctggagaagtagaacatggctagttatttgaatatttgaataaattcttcctaggtttaattttctgacacactgaccttcccagcaatctgggatggcaggtggttcaagagcaaggacttggagccagccagccaccttctggtcccagccatgcccctggccaatggcatgaccttgggcaatttacttatacttttgacacctcttggtctataatatttggataatagtaccctcttcatttgggtgttgtgctaattaggtgaattcatattataacatgctcagagcagtgtctagtatataagaagtgctaaatgggccaggcgcagtggctcacgtctgtaatcccagcactttgggaggccgaggtgggtggatcacctgaggtcaggggttcaagaccagcctgaccaacatggtgaaacctcatctctactaaaaatacaaaaattagccaggcatgatggcacgtgcctgtagtcccagctactcgggaggctgaggcatgagaatcgcttgaacccaggaggtggaggttgcagtgagccgaggttgtgccactgcactccagcctgggtaacagaacgagactccgtttcgaaaaaaagaaaaagaagtgctaaatgagtgactgaataagatttttaattaaatatcgttcttgtatttaatttcctacacctcagtgttgaaatcattctcatgtggcattcagtccttaactcttttaatccactagggggcctggtttctggtagactgtggcactgatgcagaattatgaagacttcagccgtgaggagttagatttttcccccaagttccagtatcttgctctattctttatttcctgcccaaattctaccctagctttcactctgtgcaaagaaaggagagcatcatctctcagaccaatggagaattcatattaagcacagcaaactttcataaattttgtttacttcatttgattttctcttgtagttgggaaaataatgtttcgctataaatatccttttcacatttctgttaggctgtaagaaactcggatcctataaatgatgattatcagttgattaactaaacaatgttagaacattcaaaaaggaaaaaatggtaaaaaacctatttgcctacttgaatatctttttatcttaaatcgactgaattttttttttccccgcactgacgtgaattcattgggagctttggtatcatgtagcttcaacttgaattaaaattgaaaagtattgactggacacagtggctcatgcctgtaaccccagtgctttgggaggccgaggtggacggatcacttgaggccaggagttcaagaccagcctagccaacacagtgaaatccggtctctactaaaactacaaaaaattagctgggggtgtatgcctgtagtcccagctgctcaggaggctaaggcatgagaatcccttgaactcaggaggcagaagttgcagggagccaagatggcatcactgcactccagcctgggtgagattctgtctcaaaaaaaaaaaaaaaaattgagaggcactgttggtaacatacttccctgaagttgtataggacttagaatgtaacccgagggaagctgcaatataggtgatcaagaaataccttatgaaaatattattgagtattttaatagcttttgaaatgcagcattttaatttacttttttatttcaaagtgactgaatcgataaatgggtaaaattgataaaaaacgacttaaattcctttcttatccttttatttagggaaacaattaatatctttagttgaatccagaagttttgccccaaaatctgaactccctgttaaataagctaatcagcacctcaaatttcaaggattttagggcaaacatgtgacctctttgaaatctcctcatagtacatctgcttatcctttcccgaaggttagggacgttggtgttactattcaaaggatgagacttcggtagagcaaaactgagaaaatagggaccataaaagctaaatacaaaaaagagtggagagggttatagcaccaaaagagaaaaggttccacattgtgtcagtgcttcttagactttcatcagggctctgactggctgggtctggaggggctgtcggggagtctgtggaggccgcctttctaccaggcccccaggtgatgctcatgtgcccccggtgagtgacagggcagctcctgtgttctggaacaacagaacattctgagcactcagttctgaatctgctcttgggcccttttgttcatttttccggaggagtgatcaattaaaatttggaaagtacttggatattctcagtcctgtgtaagtatcagattatgagactaaacacaagctcccagtagaccctctgctgccattgtaaactgcggacacgtcttgcttctctcttagaaacaggggaaggtatttgtcatcttgggagttcctgtggcccaatgagtgccccgaagcttgccgatggcgtcatttgtagccctctgttcccaatgtcctcagccatttcctcctagtttcatggggagctgcccggcacactccccagcaagcttttcctgcagtacttcttctccagggtctggaagttccgcagtccttttctctttcagcctcacctctctccttctgtttctccagcaagtacatctttaacgtgctcatcctggcttccccatctttaacttttcttttccattttccatctccaaacatctctgcccaattctgggtgaattcttcaaaatatatcatccagtcctaagtgtctcttcaactgttctaatctttttttttttaatttcaacaattatcttttttattctagaagttttccagaaggtttttcaaaatctgaccgttcattcctgatagtttcttgatttatgctcatctctgaaattgcatcctttgtttctttacacgttttgtacgtaactattcaaaacttactcctgagagttcccacctctgtaattcctgggggcctgaatttgttgtcatggtctgccaactctcacacacagtgacttgcccaaccagatgatgacacagtttggggtcaagatgttgatcaggatcaaagcttatgtagggaagaggaaagaagtgagattgggcagagggagaagtcagactgccatgctggcccagtcaagcctcagctaacctggcggggcactatggaacatgcccctagaggctcctatgttgggccaaaatgacaggctgccctcggaaggcagacctagaaggagctgcccctgcaggccttctgcagaccgcacacgctcagctgggcagcatgaccttccctggagggaatctgggcgtcccatctctgtggctacacttgctttccttagtgtctgagagtcttactgaactcttagcttcatcttcacctctgcaatgtttgggaaggcctctgaccctaatttacggaagctctttttctgagagttttgtttctgcaaaagaggagggtggggattcccagccctggaccctgtcagcacccttcaagggttttgctaggagtgggagcccctgggcccactcccccaccatgctaatgtcctcagtgtccgtgtacccctgtgctcctgacaggctctgtctagcacctccaacaccttggcttggatcccagctcctcacatgctccctgggcacacctgctctccggtgcacctgcccaaatgttcagctcccccccagccccaggcataggctactcaggccccagctccccattgtgtgtggggtacaggggccattctggaaccttcctgcctttataccagctaagctttctatctgggatggggctttccaggaggccttgggcttgtcaaagctccctgccagcggtcatacgtggagcagccattctgtgctttttgtaacaagtggcatctgtacatatgataaagcactttattgtattttttacaaagttacttcatttttaatgatgatgttgtttatgagtccttactatggtgtgtcacaaattgaatgaggcacatccgtgtatgtacttaggcatttctgcatatctcagtaataagaatttgtgtaaacactacagaagaatgcttgttccttttaagcttgaattttatcaagcttaattaagaaaagcagtaaagtttcatttgttttgttatatttgttatatttgcttaaatgtagtcatccttacttttttttttttttttttttacttcaagacgatttgaaatcaaattatattaactgacatttacagatcattatccccaaacataccaagacatccactcaaaggaagttgtatcatttatttatttatttggtcattgtacaccagagcaatccataatttcaggcttctttcttcccttcctttcccttccttttccttcccttcctttccctttccttttctttcatgtgaagtatattgtaggaataatctctaaacatagcccatggcacagtaaggattaccgataatttaacctttcaaaaacattaaatgaaacaagactttacattgaagtactaatttgatgctatattaaattgtcacttcaagcttttttaaaaaatgagtgaaacatgataataacagcaattcctgaaagccggagcccaggttcacactatcgtgcggagatataaatatttatctattgcagtacatcacttagaaccctttctgcttcaaccttcagtcagctgtgaatctcttaatggcatttcattctccatgagaatagcaacaaatcagggcttcataacccttattattctcggtgagtgcctaagggcaaaggaaacctaggtctggtggctgttacgttttatgtttttgaaagcctaattccatgactctaatttatcattgcattacatttctaacaagcccacagtagtacaggaaaaagttctgagggagaattaggaagggagaaactttacctttgttgacgacatcatttataagtagacttttttttttttcttttttgagacagggtcttggtctgtaacccaggctggagtacagtggcgcaaacacagctcactgcagcctcaagtgatcctactgcctcagcctcccaagtagctgggaatacaggcatgcgccaccacacctggctcatttcttttatttttttttgtagagatggggtcttctcatgttgcctaggctggtctcaaactcctggactcaagcgatcctcctgcctcaacctcccagtgctgggattacaggcatgagccaccatgcccagctgtaagcagattgttttttaaaaaaagacagaaaaaagtgaaaactgttagtgttggaaatgcatgttacagatgagaaaaatttaaaaagccagcaaaaataggaaagtttctgacagcactcttagaattaacggaagctattatgtggtaagtaatgaagggaagtgacaagagcaagaggtgcccagctatgacagtgcagaagtgaacggtacttaataaaaggaatattttaattttttttttttttttttttttttttttagagataggatctccctgtgttgccctggctgatctcaaactcctgggctaaagcaaccctcctgcctcagcctcccaagtaactgggcaaaaataacattttaaaatgcaatgcagtgaatttaacactgagaataggaaagctgaccccaaagaataagtgtgattgacttagctacatatagcaagtataagaagaattggtgataatcaggttcacttttatgaagtttgagagtagattttcagcacctattcagatggaagctcaatgtcaagcctccgctccaggtgccaggcagagctgctgtttgatgtgagcggagggcttagatacaggtgacctgcagagtcagacaggtggaaatgacaggtgagcattgtgccaccaggaggaatgcctcaggggaaaagccctactcaaggagccgctgaaaggaacactcttcggtattgtgttcatgctgcctgtgctctcacaggagaataagcccacttatctggtgtgtgctcttaatttctgagccacacacgggacggccagcattgttcagtgtttggtccatttgcagcctcatctgccttgggacttcaaagtgtctgcagacaggagttggcagactcatccattctacaaaggagcctcccgggccgcattagagcactgcacctgtcgagtctgtaaagcgagacattaccatcgcagaaagggacaactgtgttgatgacgtccttttgccagtggggaaggattgccttgtagccacatcttgtagaccgtggttgaaagtgaaagaaatgcacctttcctaaacagtggccccaagggactgcattgtaactttggcattcttgtaatctggaagttaaacatgtggaagagaggaggcaaaggttcctcagattgtcttgtggttgagccaacagtgttttacaaaagggtaatagataggatgctttaaactcttacaaagaagagaatgaccgggtcaaataataggttgttaaaagcatggcattgtggtacccccagtacatgctcttcttctcactgtctttcttttattttctttttgttgagatggagtttcgccatgttggccaggttgatctcaaactcctgggctcaagtaatccgcccgccttggcctcccgaattaccgggactgcaggcatgagccactatgcccagcctcttcttgctgtttttgaagcattcgcttacaagttattttgttaatttgtctatgatatttaagttttgaagaaaaatgtgctcacagttgtgatcctagaagcaacataagatagaaatattttttttggtgttttacgtttacactaatctcactttataaatacagagacactgcagcattattaattatggagagtccttgaaattgggagtccccgtcatgcattaaagatacaacccgtgtctctgagagcatttggggcacatatcaggtgctcctggaagtctccctccctcacgccttcctgcctttgccctctccacccctcacctcggggccttggctgcatcttggccctgcttgagtcatgagcaggtcttgtttcccttatctccacattcatcagaatgggttgtctttttttttcttttttcttttttcttttttttcttctcagacgaagtctcgttctatcacctaggctggagtgcagtggcacactcttggctcactgcagcctctacctcctgggttcaggcgattctcctgcctcagcctcccgagtagctgggactacaggcacctgccaccatgcccgtctgatttttatatgtttagtagaggcggggtttcactatgttggccaggccggtctcaatctcctcctgacttcaagtaatccaccctcccctgcctcccaaagtgctgggattacatgcgtgagccaccatgcccggccagaatggagcatcttaaaggcagcaagttcctctgtggttggtatgggagcatcatgtctaagcagtgttatgcccaaagatcccctcccctccaagggtgaggatagggaggagctggaggggaaggaggcagacgtcctctaattgttgtgcacgtgattctgtggagaacaccatttatcagctttatcagtgcatacaaactttgggaagttgagagaattttaagtgtgaattctgtataaatcatcggatgtgattctttactcttattcagtgacagattgatatcactagggttacgattctgctccacccctttcctcaaagttctgtttctcccgtgatgctggagaatgaggatacattgcgtggtacagtttacacgtgcggtaatagtcccagaacagataaactgtgaccatttccgaattctcccccaagttaaccatgtgactgccttgttttttttttaagattaacatccttaaaccgttattttgtggtaccctcttttcctcctttcatgcccgacatatgccttttttcctacttattgtgtaaagttcttcatttgtcatggccatcgtgagaaaaatctggggcttccctttcatcataaatgacaggttttttttctgctttcaaaatctagaattttcatatttgtaacacctggaggtaagggtcatggtgttaattataaagagagcagagagagtaggcatctgtaggaaacatcttgggtttttttaattatttgctggattcatttattcaacagttgtatatgaaatggtttttacacatgaggtcctgctaagggtagtgcttgccaccttcgtggagcttacatttggcaggaagctgtattacactagatgaatcctatgtggatgtgcaactcaaaagaaagggttgtggactgagaatcataagtttgggggttatcgagacgcagatagaaatgtaaacaaacggtgtggatcaggtagcctgtacacagtgaagaagagaagatgagaggacatctaggtcagggccctgacaatgggcatgtagaggaggaagcattggccaaagagcaggaaagatgggacggagtaggaggactgccaggagaacacagcgtctcagaagccaagggagggaggaagccccagacaagagcgctgtttgctcatggggttcaggagagagaaaggcggagaagcatctgtcaaatttaaccactcaaaggtcattgagatctcagggggaacagttgctctgaagggaaaggaaagtaaaatccagagcaggatgagctgcagaatggatggggggttacagagcaacagaaaataagcgtagacagctctgccaagaagccagtcaggagagagaccagagatggagaaagacatggagtcaaagaagggtttgtgtttctttttactttttattgtaaaaatgttcaagcagacagaaaattggtagcatatacccatcacttagattgaacaattattaacattttaccacatttgcatcattttatttttgcagaaatgtttcaaaagtaaatcacagacacatttcctctgtaaatactttgatatgcttctctgaaacataaggacttctcaggttaagaaaattgccaataaattccttcctgtcaccaaatatctagtgagtggcataatcaggtgtccccagttgccctcaaagtgtacgttcaagccaggatccaggcggtgccagaccgtgcatctctgcaattgagagggcgttttgtgttttgtttttgttgctttaatgagagaaacttcagcacatttaagcactgttgagaagctgctagtggagggagagaggttgaggatcctggactgagagggaggatgctcaagaacccgacaagatgcgtcgcagtgtgactggagagaccactctcagaaggggatccaccgtgcaagcactgagtgtctttgcctatttgtgttgctgtgaggaatacctgaggctgggtgattcataaggaaaagaggtttatttggcttgcaattctgcagactgtacaagaagcatggtgtcagcatctgtcgctggtgagaccctcaggaagcttctactcatgttggaaggcagtagggagctggcatggcttggcgagaggcaaggaaggagaggggaaggctcttttccataagcagttctccctatggcaccaagccatttatgagggacccacccccatgacccagtcacctcccaccgagcaccacctccaacattggggatcacattgcaacatgaggtttagaggggacaaatattcaaactgtatcactgggagatggggctaccggaagtcaagccattcccctcccatggcacccttttccacctgaagtaggataacttgcacacggacaagaaccaggtgtctctgctccctgatgcaaagtcagcaccgctcatggtaccaggcatatgatggatgctcaatacgtattttttaagtgaatctatgaatactttttttttttttttttttttgagacaggagtttgctctgtcacccaggctagagtgcagtggcgcaatctcggctcactgcagcctccgcctcccaaattcaaacgattctcctgcctcacccagcctcctgagtagctgggactacaggcatgcaccaccacatctggctaatttttgtatttttagcagagacgaggtttcgctgttggccaggctggtctcaaactcctgatctcaagctatccgcccaccttggcctcccagggtgctgggattacaggtgtgagccaccgtattctcagcctctatgaatgaatattgagagtgatgagggggttttgaggtttaataaaaatggaaaaggttcaaaagatagataacacttccatactactttttatgcaccaggctttgttctaaaaactttataactaactcatttaatcgttaagtactattattacctcccagtttccaaatgcagaccaagaggttgaataactgtcccaaggtcacacaggtaatgaacacggagctggaccgggagggctcttagctgtgtaaggtggctgaggctcgtgagaccccggctaaagctgtagctgtaaatctacagtctccctggttcagggctgacctccagcagctggtgtgtgtaggaatccttggagttaacacccgctggtgttacgagtttgtgctcagcattctctgggtcaactgggagaatccaccaggattctcattcaggtctctttgtgtcaacatctgcctacaacagcgcatcgtgctagagaacagaggttcctagcccaggcattcacagacccagttaaatgttcctccactgaaatgcagcagtgtgcccttttcccagtgcttccccccagaaattcagttaataggtataattttctctactgcaaaattttaacccattaatgctttctaaacctttgatatcacctgcagcttggcagtactcgaatctaatagataaactttggtatgacttgtgggtttgtacatgtttatatcctcaggagttttaggtattcatcaaggagccccataagtgagccatacgtttgagaacaactgtgtgtagacttgctgataaagtagacagactttttttttcttttttgttttttttttgagatggcgtcttgctctgtcacctaggctggagtacagtggcacgatctcggctcactgaaacctccgcctcctgggttcaagtagttcttctgcctcagcctcccgagtagctgggattacgggtgtgcaccaccacacccagctaattgttgtatttttagtagagatggggtatcaccatcttggccaggctgatcttggactcctgacctcgtgatccacctgccttggcctccaaaagtgctgggattacaggcgtgagccaccgcgcctggcaaagtagacagatttgatctgtctcttttcagtgtaataatttagctaatgtttaaggtaggggaggtatagaatgtaatctgtatgggtgttttttcctaaggggggacaactagtcaatgatttgctgtataatattcaaaagatttcttgaccatatttgtagcatgaataatggttctttgtcgctgtgagacatagctttctgtggctctgcacagcaacttgaatcagagaggaatggcgggattctgtaaaggtagttcgtgatgggagctcagtgaggggttgagcagcaaaaccaaaatcggtgtgtcccctggggcagggactgtgtcttgtgggcctcaaaaataactgcctcggagcagaccccactcagtacatgtctgtatgtcagttgggagcacaaaacaggtgtaacattaaaatttcttaacagagttttgaatgaaaataatcattatcatcttcagtatagtatagtacacagcaccgtgtgaagtattttgacatactcttacctgtaaccctcaaaacaaccttcaaggtaggaattaggctctttttctggaaaatgaagctaaactgtggagtgatttggtaacttgcccaagatctcacagctcgtaaatggaggcgccaggacacacacacacacctttctggctcgcaaacctacgttctctctactgcacgtggagactagacttcctcagtctccatgtttgaaggcccatccaaccacctttctacagaggccaagaaccccttttcatttctctagatcagatgtgagaaattttcttttcacccagtggctatttactgcctgttttgcattagcaaaactcaatttattatattttgaaaggaaatagaaaatgtttcactcatctaatttcaaataacaaggtgaaactctactcaggaattacatgagattaaaatttatagctcagttattgtcaataagaaaaaagaaagggaagaggcatctttaaaacttgccaaaactctagatggcaaaaatcagaatcaagtaccaatgctgtttatctttaatgatcaaaaccaaagactttttcattcttaaagtggttaaatattatcagaattgattattaacagtatttacaactaagaagtttgaaaggacattctaattacttttgtattttttataaaatgctcattgtaaaaaaaaaaaaaaaacagaaaatgaaaaattcaagcagtatagtagaaaaggatcagaattccctccaattgcatcattagcatctctgaatatgcccaacatgtatggtgtttacagtaatggaatctcaccatttatgctgtttattatcctggagattgcacacgtgtcagtggacatagagcttttttgaaatattacttccccatgattttaaaggaaggaaaacctaagcttcctttgggaagtgcagagggacccctgttttatgaaaatctgctctcagggagaagtggctccatcttgtggccctctggagtttggtcatgaaaaacagccaaggtcgtgttgtgtttttgcaactctcctcggaaatggtgtcaaccctgggcttgtccagttaacttggtggaaaccagcagggacaaggcagtccccatctgccggcagagcaggagcgagggtgctatggtcacaggggttgcccccttctcccctgctctcttgagaagcttagctctgccctcccagcttctaacactgggctctccacaatttcctctttcatctcgacttcaacactgttagagaagctattttagcagccaggttgctctgcctcagccttgtagtcagggctttgggggtagaagacagaggcgctaggtggagtgtaatatcccttaaaaggaatttgagaaagatagtcacatgtcctcttgccttacacgatcatatccaaggtttgaccatacaaattccatttggaatgttggaaaaaaatctgtttggagataaaattgaattttcttttctgtgtagagatggtgaacacagatgtgattggtaagcagtacaaatgtggtcattttctgtaaataagaccctaatggctggagtttttcactttgtatgaacaccataggcgtatgtattttacatctaaggaagcaatcttttgattggatgtttttttcctttttctttctctcctatgcagtacatagtggaatgtcatgggatcacccttcttccccagttcttgggcatgtaccggcttaatgttgatggagttgaaatatatgtgatagttacaagaaatgtattcagccaccgtttgtctgtgtataggaaatacgacttaaaggtgagactgattttatgaatttttgtaaagtaactcaagcttactcttctacattgtaaatgttgtcattgatcatcagaaatgcttaggagccgctcagcacttaaagctaccagacaagtagcagtgtattccttcctgtgaggcaataagtgcttgctggcctcaccgaaaaacactggcacatgttagagatatcacatctacttaaatattcagccaactgcataccaggcactgttctagatgctggaagtgatgggatgaacaaaccaaacctgcactcggggagctgacattctggtgggtaaagacaggcagtaagtaaaagtgataagttagtcatagagcatacccagaagtggtaagtgctatagacagaattaaagagggggagggttttaaatagtcctgtcagggaaggttcccctgagaaagatgacattggagcagacttgaaggagatgaggaaatgagctgaggaagaatattgctggcagagggaactgtaagtacagagaccatttcaaaggcttggagataaaggggggcccctggaaattctgagagtggagtgacataatctggcttctggtatcaccaattcaggggagaatgttcaagttaggggttggaaaactatgacttgcctgaattccaaatcctacttgagggacttttttttcttttcttttcttttttttttgagaaagagtcttcctctgttgctcagtctggagcgcagtggcgcaatcttggctcatggcaacctctgccccactggctcaagcagtcctcccacgtagctgggaccacaggcacgcaccaccatgctcagctaattttttgtattttttggtggagacaggatttcaccatgttgcccaggctgatcttgaactcctgagctcaagcaatccacccaccttggccttccaaagtgctgggattataggcatgaaccaccgcggctggctgggccaattttataaatacatttttattggaataccacgatgccccttgtttctgtattgtctgttactgcttttgcactgtaatggcagagtttggtagttaccgcagagaccatttgggaccacaaagcctaaaacgtttacccactgactgtttgcagaaaagtttgccaaactctggtctctgacatttggttctcaagttttttggtctcaacgctttcacgctcttacaagaggacactcgaaagcttttgcagatgtgagttgtgtctgtggatatttacagtattaaaaattaatataagaaatattagaatatgtagtttctttaaaaatgagaaaaacattacatgttaacatttttatgaaaaataactattttccaaaagcaaaaacatgaatgagacaagtagcattgttttacatttttgcaaatctccgtaatgtcttgacttaatgtgagatagttggaatgtcctgtctgattccgctgtcagtctgtgtggtgttatgccgctgaagtatgtgaagaaaatctgaactcacacaataatgaagtttggaaagttgttaaagcatgttttaacaacttttttggataattgtagatattcttctttgatactacaccaaagcttgacaagaggtaatttctcaaagcttagttacattatgaaatctgaaatcatatcaatgaactttttgtactcttcatcgaaatccattgattggtttgcatgcattgtttgaatgtgtgattttgccaaggcatgcacttgccatttggaacacattggttcactgagttatttgactcttccaaatattgacacatttcattatacagtatcaaaaagtcataacagtgttaccaccaatgtcatcagaaaagtcttttacatattgggaagcggtcaggcccaggatggtggatataagttttttaaaaatcagttttttacttggaatctcaaattttatcactggccacaagccctgtcagttgttttctgtgaaatgaccacatgtagcaagcaccccagcatacaggggagcctagcagcttcattcattttgtagcaaacatcagtcacatgcccagatctaaataaacatagactgtcagttgttctttcaagtaaaagtgttgtttcatgaaaaagatggccagttcaactcataactcaaaccatcacgaaaacagttcttaagaaatcattccttctttataaacagaagtgctttatgtatatttcctgcacagaatattgaaaagacgtgtactcctgggtctagatttgatacatttaatgttatgctttcatgtgtttactagatgcctacttgtatgacacaccatcttagccagaagttcagcaactcgtacacagctcacaagtcacaaaaaccaggatgtgtggcttcagaggtttctgaaatgacgctgggtttcttagatggtgctggtttttttcattgttttttttttttaaatcacaaacactactaatacccactgttgccactgtttgacttatgctaaactgctagcagttcttcccaccattgtttttgcattatttatacaaatatcaagacgctgaaaaaggcaaataatttctcagtattattataaaaatagttttggctttgtatagttttggtcttgggaccccagggttctgaaccatgcttagagaaatgctagtctaagtgaaggaaatggtctaggcttgtctcctaacctctgaagtccccacacactggatccacttcccaaatacacccttgtcctgtcctgtcttaaagtcttcgcccaagcaagccattttgtgcccctggaattgcccctggggaaatcccagccatcctccagggcccttgccagcaccagctcttttcgtgaagccttggcggtactgctcagagcacacaggactctgtctgacttccccagggaagaaagccagagtgacctctaaagtcacatgttgttcttttatgacttgttaaccttgtgtaagttgctgaacctctatgaccctccgtctcttcatctgttaaaatagggataattttacctacatttgcagggatgttttgagaattaaataagatacatatgtattgtgtccagcgtgaggcatggcatatgggagttaatgaatcttggttgcctcattcattctcctgatgtgtaagtgcctcaagggcaagtatgttcttctacttaacttttttttttttaatccccctgcaatgcctaagatagcgcctcggacaagtaggcatctggtaaacatatcttggagtaaattatacttagagattggatattctagttttaatttgccttgcttttttcacagtttcatctccctttctggcttgtggcatagataaactctgttcttgccagtgctctcagttgtgatggaacctgtacatctggcattgtttcatggcttaaactcttggccttccttttctattttttttaataattttttattgtgaattaatttaaacttggatgagttttgtgttttgttgttcccaagctaatgatcagcatttgcatacagatgaagcttccctgagaatcagaagcagggtggattatattgtaggagaggaaacacacacacagacacagacagacacacacacacacagacacacacaccccaagaacttggttaagaattcaaagtagaatagtttcttcctgttcccagcatcataggcagtgctcaagtattacaaatgtcccatttttaaaaagtatttgggaacattcgttgtgaaaaatcagtgtgtaaaggaaggtacttctggtccatattcaggaatccctaaaggaaggaaagtagaccatggcaagtaacagttgctgggcatggctgtgcagaggggctcggactgtggtcgtagaatgggttctcaggtttgccttcatgaatggttcacattatctgtctccatctgatgggtcagctttgggctgctctgaatcgccctgagaaacattgaacattttccctgggccagcagcagcgtccctcggatcttccagtcctgggggcactgagcaccagggggatggaagatcggccctggggagacccccccagcctggtcttggctcccttccccaatgtgaggagtctcttccgttcaagtttccgcatctgtgaattgcaggaagctcaatcctagtcaatgcctgagctgctcgatgaaagccagtaatcaaaaattttgatttctttgcagatggccaatctaaaagccactttcacttttcccaagccaactgtaagttcatttaatgaatggctaactcaagtaacccagggcaatagatgtcttttcatcaggtggtaaagaagcaagtggcttggctgacctcacgatagttaggggtgtccagtgcaggaggggaagggagcccaggaaattggcctgtgattcttctccagccatttatgcagtaaacacaggacatctgctgtgtatgagacaccgtgattgtcatccatacttaggaattcaccagaccatttgtttcccagcttttcttttgaattaaaatcttccacaagccacgggaagtttctctgcttggactctacccctaaagcctccccgtcggcctccgaggtagactcaggtcatgctagacaacccagagctctaaggcagagttttgaacaccactgcagtaagagcacaaactgctgagatcaagggccatgttttcctccactttgtacctctgcactcagcatagggcctggcacaaaagaggtacaaataactgtgtgtctttgaaggaatctccaaagtaaatggggtcagagagtggctgtgggggactgatgtatagcaagcaaggaaagagtgttcatcagtaactcttaagacgggagaaaacaatgagcattgcagaaaaaagtcagcaggtgaggatgtgcccacagaaggacgtaatgtggggaaagaggcacttaacgctcctgtggtcccactgcagccagctagtgggactctttaagataacaggactgactatttctggcagttgatacaaggagtaaagtgtggggctgatccagtgttgagtaagttactgctcaagtaagtgatggtcaggttttctaacttccagcaggtggacaagaaccacagaaacacaggtgagcaagacagagtcagggctagagaagcggccagtggccaggaatacctgcagagaggggacacaggccggacagagagccatggtcagggagggatgagaagcccattccgcatgggctgcgaagcagagtgggtgctgagctggctctctgctccgcctggagccattttcatattttctgcgtgtgaaacccaatgcctcccatgcgcatgtttttattattgccttgtgtttcagggctctacagtggctagagaagctagtgacaaagaaaaggtaagtaccttgctgtatgtctccccatgtcctgggggcatgatcacatactcccaatcacctttactctttatttctagtctcccacccctgctattgtggttcttcctgttccccattctgctgccaccagcgagaaacactgtattgacccgatgagagttctacttcatttctcttcatcaaattgttgaatagtgaaacagttatttgttgcaagcatggttggaaggaacattccacatgcaacttgctcttgaaaaacacagccacctgtgcagtaaacctataatcgaaaatggcactgacagctgagagtgcgttcctgcgggtcagggaaccaggacctaacactgcttcaccgatatcaaaccgaatgtgaccctgaatacatttctttgcatcgctgagtctgctttctcacctgtagtatgttggcttggatgagcctcaaactcctttccaactattaagacatgatacaagtattttttgcctaagaaattaaggataagaagactgcatctctttttctcttttcctggcttattggaccttaggtagtatttgagccacatttagtttactgtgcaagattatagagagagtcaacttgaaggattggtttgaataggaatttaggaagtagcttcctggatgtaaacctaaactaactcaagtcaacacatgcttatataaagggtacatctatactcttagttatgccttcttgtcaccttgggaagtgcctttttcttaactattccatttgaaaacagagctcaaaattgttgtttgaaagttgttcttttagactgatagcagttttgagttgaattttatagatttgcaaatctacttttgtttgttcattcagaggtgtttgtgaatatttttgtggctactatcctagcttcaggggctaaaataacaagacacacagaaagatctagcaggggatgcagacctcaaatagaaaattatgttatcatggggtgaacacttggacaggacactcagggagctctagagcacatagcaagggcgcctggctcaggctgggcagggtcaaggaagggcttcctggaggaggtgatgtccagaaacctgaaggatcaataggagttagtcagaggaagagcggcaggtgcaagggcatgagagtcagagtggggagtatttggtgcatttgctgcagggagagaggaagccacagagggaaggaagccagtcctgtcagagaggctgatgaagtagcccggagaagatgctggccggagctgggatgtggtagaagtggatgaattacagagagatttgggaagacaaatctacagaactgagggattgagtgccagaggtgccagggagtgtgcgtagagggaagggggttaaggatgacccccaagtttctggtttaggcagttgggtaggtaggtgttcattccactccctgaaatagcaaacaagagcaggaggaggagtttgaaatgtcagttatcggggaacctgccccgatattcacataggttcttttctgtttttcctaagcatcagccggcttgagaaataaagggacagagtacaaaagagagaaattttaaagctgggcgtccaggggagacatcacacgttggtaggatctgtgatggccccacaagccacaaaaaacagcaagtttttattagggattttcaaaaggggagggagtgtgtgaataggtgtgagtaacagacatcaagtacttaactggttaatagaatatcacaaggcaagtggaggcaggtcgagaccacaggactgaggcgaaattaaaattgctaatgaagtttcgggcaccactgtcattgataacatcttatcaggagacagggttttgagatcaaccggtctgaccaaaatttattaggtgggaatttcctcttcctaataagcctgggagcgctatgggagactgaagtctatttcatctctgcagtttcgaccataagagacaggcacacctggggggggctgtttataagcctgtatctccaggcgcgtattctctttctcagggatgttccatgctgagaaaaagaattcagcgatatttctcccatttgcttttgaaagaagagaaatatggctctgttccgcccggctcactggtggtcagagtttaaggttatctctcttattccctgaacaattgctgttatcctgttcttttttcagggtgcccagatttcgtatttgttcaaacacacatgctgtacaatttgtgcagttaacgcaattatcccatggtcctgaggcaacatacatcttcctcagctgacaggattaagagattaaagtaaagacaggcataggaaatcacaagggtattgattggggaagtgataagtgtccatgaaatctttacaatttatgttgagagattgcagtaaagacaggcataagaaattacaaaagtattaatttagggaactaataaatgtccataaaatcttcacaatccacgttcttctgtcatggctttagccggtccctccgtttggggtccctgacttcccccaacagtcagtgcggcgtcagaacagagatatccagtaggcatgagaggctgcacagtggctctcagctgaaaaaagagtgtgggaatcctccctgaaaggatggttggcagagacaggaaagtgggtgaggtcccccaggaggagtgtgtggagaagagaagcatgtctagaacaagcccagcagaacatcaccttttacaggagccaggagacactgggtcactcactcagatattgattgtctgtgatgagtacacactctgccaagcattgtaagaactgcttcgtggaactaggctgatacagtccccatcctcatgaaactttcactctagtaattttccatgaaccagaggaaatgaacttcccagcgtcagatgctttcgtgaggccaggtagggtaagaatggagagttgtccagggacatatccacagggaaatcgctggggacctggtcggtgagggcgagtggggaccaaagccagattgcagcaggtaaggaggagagaagaaaatggtggaggcttctttggccatttgcccttttactgtacatcagtgaatgtacattttgagaattcaaccttcgcctaaaccccctctaaggcactggctttggccagaagaggcagaaacagtgactgtcgacttccatgctgccatgagtgaatgtttcttccaggtactgaagactcagcaggtatttcagttttagcccatgagaagctcagaggctaaattttgttgagattttctcctcagaggaaatgccagggtgtgtacagagtcacacatgctcttcagcatcgtacgacaggccagcccctgagtcacatgatgccccatgttggtgggtctgtttttactttcttccaaagttccttgggactaccactagcaggatttttttccttcattcattttgatttcttcaggttcagtcaacaagtgcttggtcctgctctgacagtaaacactgccaacaaggacagttacagctaatggcgtggttgctgctgaggcctaaatcataaaacaagggcacacagagaggaaagccacacgtatttgacttcctgtatctgtaacggttcctgcaaagcaggacattcacttacctatcttccgttccgctgttgcacctataggacttaacacactttccagaaacccagggcatgaaccacagttcactgccctcctcaccaaaaagtgtttagtccctttattggtatagcttcctatgaaaagagaataatagaatttgtttgaccgagaactcatctttctaggactctgctaggatgcttttatcctgtatctaatatgaacacgtagccatcattccttaaaacatctccctagggggtaggcttagaggaagtcacaactggcactggttgagtacaaactatatgccagaccgttttaaattgtacatgaattatgtcatgtaatccttaacagtcaccagatgagattggtgctgtcgttacttactttgagtggatgaagttgcttaactgacaggtttagtaacttcatccagggtcctacagttaggaagtgacagcgccagggtttgagcctgggatcagcagccccagagcgcacatttctaaccactatgccacactgccttgtaaatgtttgtgagttcatgtctctcctttcctttaagggcatattatcaaaaagtcatgttaatcccattgtgaaaatgaggaaaaagttaactacattgacaaaaacattgtttcagagttaaatatggtgctgaaacagttgattctaaaacttgattttttttctaaagtagtgaaataaattatttgtttccatactatgttagcaaaacaatttgtatttcctctatttgaagagcttgagcattttcgctcatactttcagatgtacatatttgtaaaacttttacgtttaatgcagtctttatcacgtgtcttacactgtgcaaacattagaattgtctgcacagttgccctgaggaagaattcagtgccctagccttctttttgtggttgaggtttctaataactcttattccagaagacagaggctgcataaagctaccccacccacccttctatattaaaaatgctcacttgggaaggggaaaaggaaatagcttgaagatgtggaatgtcaaagtcatagaaattggtaaatgatggagagtgtgcctgccttgacagtagggtagagatcaaaatgtaccttcattcatgcacagtaaaagggcaaatggccaaagaaacatccaccatttccttttctcctcctcacttcatcacctgctgcaatctggctcccacccaccgtcaccgaccacgtccccagcgatttccctggggatacatcacccagactagagagagaggaggcatttgaaatgtcagggtggcgtcagaacagagatatccaataggcatgagagggtgcacagggtgtcttagctgaaaacaaagggcttgggaatcctccctggaaggacggtcagcagagacagggaagtgggtgaggtcacccaggaggagcgtgtcgagaagagaagcacgtctagaacgaacccaggggaaagtcgtcattcatggctcggtagagatcatgccatgccttctctctctgatacagcagtgttttgtagactctagaaacgtttgttaaactgtaatagatgaaatgaaatgtattaatagagccaaactgttttgttttttttcgagacggagtctcgctctgtcacccaggctggagtgcagtggtgcaatctcagctcactgcaagctccgcctcctgggttcatgccattctcctgcctcagcctccctagtagctgggactacaagcgcctgtcactacgcttggctaatttttttgtatttttagtagagacggagtttcaccgtgttagccaggatggtctcgatcccctgacctcgtgatccacccgcctcggcctcccaaagtgctgggattacaggcattagccaccgcgcccggccaagccgaactcttaaaaacattgtttgtttgtttttttaacttttaaaaaaagtctttgctttcccttttctgccatcctttgggttttctttccatgatcagttaggatttttgactcttccaaaaagcctaccattcattgtgttcacaaatcataaatactcctttttatgatcagacatcgggggggaaaatgctatcaaaacagtctactaaatgctatcaaaacaatctactggtacctactggtttgaaatatttggggaaggctaaaaacacttactacattttagcnnnnnnnnnnnnnnnnnnnnnnnnnnnnnnnnnnnnnnnnnnnnnnnnnnnnnnnnnnnnnnnnnnnnnnnnnnnnnnnnnnnnnnnnnnnnnnnnnnnnnnnnnnnnnnnnnnnnnnnnnnnnnnnnnnnnnnnnnnnnnnnnnnnnnnnnnnnnnnnnnnnnnnnnnnnnnnnnnnnnnnnnnnnnnnnnnnnnnnnnnnnnnnnnnnnnnnnnnnnnnnnnnnnnnnnnnnnnnnnnnnnnnnnnnnnnnnnnnnnnnnnnnnnnnnnnnnnnnnnnnnnnnnnnnnnnnnnnnnatcacaccactgcattccagcctcagtgacagaacaagaccctgtctcagaaaaaaaaaaaaaaaaaaaaaaaaactgcatagagaatctctggtgacatagtttaattagtaatctcaattcttattcttcccaggttttctttcatatgagtcattataacttctagttttccatacttttaacttgttgatgacaagtttgaaactgtcatttcaaatatttagcgttataggtgcagacaagtcccatttcttagattgtagcttgacatgtaattagtgtgatttgcattagcataatcatgaagatggaactgaaggaaataagttatattctaacaatggaatcactttcatggcaacaagtctcagaacatgcatgtacagatgtcttgaggttttttttaagagcagaacagtgctttaaaaaaaaataaccattgtcaaattctgacagctgctatgacttgttttattctttaattctttcctttttaatggaagggcatctcccattcatggctccagcagtttcgcctcctctaaatgagacagagaaatgtgaacctccctggtggtcgatcttttcacagctgcgctgcaattccagtgtgacatcaaattagtaattatagctgagcgggctgctttttacaaatgacagtcttagcatgctgcctgctagcgagcgactcagcaggggacctggggaagtaaaagaaaacataactggactcacttgatttctgggggatttgacctgactctttaaaaagcccatgttcttgagagagagagtcctggggatttacacaaatatgcattttgttcatcatcctgcacagttcttctcaaaactcatgtctgattttattaggtaaagtaaagtatgtgtaatggagccatagggtcacaataagaagatcccttttaacatacagccttcttcctgaaacccatttgaaagaaaacagctgccctgcaattggcatttgtgtaactgtattggcaataatcattgttgacactttgataatgggctacaaaaagccgccttgtcgattctcaggcactgtgaattgcaccagcaattaagtgactgtcaccgtctccgacgttttacctattaccaactgagggttcgagaggattaatcattaatacccttacgtctaaaaatgcttttcgaaaccagttttcagcatttcttttgtggtctttaaattgtaacaaattataattaattactacccctatctggtcatctgggctgccattgaagtgaggtggccagggcggcgggctccccaaacgtgacacaaaagcacagcagcgtatccttctggaaatctttatttgccgctcagctaagaagtgcctctttttccactgtgggcggatcatcggttaaaggggggttgtcaagctttttaggccctcaattcagctaatgctttaaccgccttctgtaaaattccttttcttccgagatagaagggaatcatttccctttgccagccagtgttagttagggacaccaatcctactacccaaagtgcaggggaaagtttcccactagggcagaagcagggcttctttctcagaccttaaaggtggcaccagtaacatctaccttctggaccagagacattttataaaagggagatttgggtgaaggactcgaaacagagggttaggggatctgagtcccagccctgggggcacagggctgcattaatggggtttgagtataggtcatctgactttgtcctcgtttgtaaaattaaaggatttgcttgcgtcattgctcctcatgctgtagtgttggtgagaatctcttgtttcaaatgaagctttcctggaccttcctccagagatgtggttcagcagtcggccccacttggagaagtcctggcctgaccatcactaaaatcttctctattccagatatagattaaggtgattgctatgattgatggggaaaaaaatgttctgttcagcaaatatagataagaaccccataaaccatgaggggtattctggaaatgaagttttaaagcttcatttagaatatctcgtaactggtaagcatggcacgtgacaaaaagagaggatcacatgcagtgactcttgtgagcactttccagattttcactcagatgacagcattaaaatcctcaaggctttatgacttatggcttatggtgcttcatcagctctcatttgcctcagattaatttttatctcactggaatgaaatcaactcagagtatcccaagcacacgtggagcactgctgttaggtatgggaatgttttcacgctaacaactcgtagttggttctagaaaaagttggggtggagagaagacttccaaaattcagtatgtggtctgaatttaaaccaagctgctacagatgtgtaattcttaattaaataatgatctttaacatggtagtattaaaccagagatctagaggagttagcaaactccttgagtgttcagcctttgacatttcttagattatcaccatagatatctgcgcaccagaatcttctgttccgactggaacgaagccatcccgtaggtcctattttgtaggtcttgtatgcagttcagctgtcatatcccagtttgtggaggaagaccaaaccgtcacctttgacattaccacatagagttgtcataaaatatgacagtattaaaaaaggaataaattttactttttacgtattagcttgagggaaaattgccaacagctaggtcttgccagccctaacagttataacttaacgcttctccagttttgcgcggcttacttacagcactgtttcacaagtatgttgaggtatattctctttccacattcatacataaacagattcaaaataaaaattataagatgttcacatctggatgctagtcacagatgtgcacattctcactgttttcactgtgaaaattagaagttattaatgacctcttagatcatttctcaaaccatgaacttgtatagacattctgcttatgtagttaaaggaggttggcatatgtactatttgtgcaaaaccaccctttttctttgctacttctgtatgaactttatccgtatccactaatttgccttttgatgtatcaaatttgtggcttagatgttccaagaagcagaactgattttattataaatctccagcatctcttattaccccagaattgataccaaatatgttactccatcaaattatttttatcctagctccaacataaggattacctaaaattccttcccttatagaaatacttgtgaattatgttttcagttccatagatgctgatttttatgaagatttttgcaagcacggcaaaaggggttttattcttttttgcaagtttattttcatttgggtgagcttggaattacaagtaaatcaggaacacaagcagttctaacataaaacaataattactacgtattttttatgtggagcattcagctctgagtgtcacagtgacagcgtatcaaaaggacacccggcagcagtctttgacattgaggcttacaattagacttaaaaaataataaataggttgccaaatgagcatatcaaacaaaaaattcattccgaaatacaagtcctttaatcacagagtactatgatatgtattatcctttgcattaaaacctagtgccaaaatcctgtttgcattagacactcaagtgtgactgggtgcatttcttcttcccagtaaagtttccatccagactaaaataaaaacttggctctatattataaagattttggctctgtgcattttaggttcatgtattttctatttccagttattaatggccatttacccatactgttggctcttgttgtataattaaagtttagaatgatcattaaaaatccaatgatattttagtttgaattctgtttaatgtttcaaactatagtttgaaatttgtgatttttaaaaattttgtgtcatctgaaagatagttttttaaaatctcactaaaataaaatgttcatataacttctggctttactaaaccttagaatatccaatattgctcaactccatatgaatgacagcagttatgcatcaaattacagaacctcatgaaataagcacatatgtacacatacacgtgagttaattcccacttcaaacaaacaaagcatttaactcttttggtaaacacattgttttggttttggttttagagattctgcaaaagttcttagtcatttggaatttttaagcataaaagtactaaataatattaagcaggaattttttaggtgttgctttttagctcctttttatcagttctgggaagcaaacagtgctgcatctcctttgctctcatagaattctgtaatttttataccacaggtctctgctaaaaggcggcatgtgtttagaaattctaaaaatgagggctctgaactttgtaactgtcctgatacgttttcccttttttaatcccaaccccctggccaaatctgtccttagagatcattgataccttgtattgaaccctagggcgtaagtaattccgttgagaggcttttatacactgaaagccttacgcgtgtgttggttatcttcaggctctgactcagctgagtgtgcatctcacttcgcacattcatgttgtgtcttaatgacacacaaactatttttgaccatgacctgtattgtcacacagtgtgtttcttactgttgacttacagtagacttgctgaggcctgtgatgctgtgctttaaaagccaaaaactttgcaaaatgagggagaaatgtctataataaatgtattatatatacacaaatgtttataataaattttctttttacaactcatagcaagttaaatgttcccagtgggttcactgctccctaggagtgagttcaccattccctagtattttggttatattttctggctactaagatttcagcttctgtggatttttgctttaggtcagcaaaacagcattcactaaattatccactattataatgtgctgagaaaaaactaacccatggaaaattaaggtaagacagaagtcagcaaatttctgtctttggccagatacgtaaaatcattacattttattccatatattgaataaagatcataaatttcaaattctttattacttcaggaatttaaccagtccaatttttatgataagatagggacattttactctcatttgggtttcagtttaaacaaaaggtcttttcagtgaggtttcctactaggaatagcttttgcaggtgatcacagaggtttttctagctggtagcattcacaattgaggtttgcaaagcagtgtagggaactagagccgccacgacagggaggttggcgcctcgggccatgtcaccttcgatgcatcctgtctcatgtgccctctgtgttccccgtgggtcctgtgtagtgaaatgaaatactaactttgccctcatgtatggtaggtttgtgtgcagtgtgcagtgacaaaagtgtcttccaaatttgaagacagtatgtagagaattcatgtgacatgtttgtaactagcagataaaacctaaaaacaaaggaaattttaaacatcgtttaaataaagcttgtcgctcacgggctgcatggggcccaggacggctttgaatgtggcccagtacaaatccgtaaactttcttaaaacatgatgagattttcttgtgattttttttttttttaagctcatcagctctcattagtgttcactgattctatgtgtggcccaagacaattcttcttccagtgtggcccagggaagctaaaagattggacccccaggtttagattaccgacatcataaattgttttttttttttaattatccaggtatcaactagaaggtatcctaagtttaaagaccctattttagaagaaatagacatagcaagttactattgccaggcactatgtgctttgtgtcatttgatttacacactaaccctattacataggtacagtattattaattacccattatataagtaaggaaactgaggtttgggcagattaagcaactggcccagaacatcacagctagtgttaaaatgttaaatatgtcagtatattttttaaaagaaaaatcttgctctggattgatcagcgatgcgcttttcctagatccataagccatacttgagaacatgattagcatataacgacgtttgtatataacacactgtgtggcaggcaccattttaggcctttttacatgtgtgaactcatgcaaccctcacaaccctatgtttgcaaatccccctttaaagatgggaaaccaagtcacagagaggtaacttaacttgccagagtcacatagctaataattggagttgcggagctacaacccaggcagcctggatctagtgtgttcacataaccatgggcttcagtttgtctcctacgtggaaagctgagccatgcctagtcgacctggggtcgggcatcactccgtatgacagtgaagggctcattttatccgaacgggaagcaggacagccaggctgcggggggaacggcgtccctctgctgatgcctgtggctgtgtttgtgcatttacacgtcacattagcggagatgaatgccacttggaatccaacccaccgcagcagattacctcatgcaagagagaaaacagccctgcctgtgctagcctggctctgcgttgggctgtatttactcacggggcctcagctggccagggccttggagcagctctggggcccccgacccgggcaggaatcccagctcaggactagacgcacagaggaggacggggtggggaagagcagttccctcccataccctcgtcccctcccagcaagtacagagggtcgtacagcaatcgtcccgccttacttagaggctctgatctgcacaaaactggccagagctgaattcagcgcaaataaagactcggcccgccgccacttcagaaaggttgctgaccgctggctggaagccggcctcggagagtccacagctgagaagcatttctgagctgtctttagttagccctgggggtttcttccaccctctggctgtttctgcactgaactagaaaagatatcaaagacactcattaaagaaccagacccagtgactacaagcttggaaaactctaagcgcaaataatccagtgtttaaaagcaaagtgtagaatctgttgctacattaagctgtcgctgcccacagttaattttctgctgctctgcagacgtcatctttgtaggcagttttacaccaagagtttattaagttcattaaatcatagtatagttttccacatttaaaaaaaagatgtttctaatataagcactgctcattatcagagagatatattgaaatttcttttaaaaagctaagtagtaagattttcttgagagtgaatcattgtcaggtgacttaacctttgtcatctcgtttttttctttttgtttttgaggtagggtcttactatgtcacccaggctggagtgcagtggcgcgatcatggctctctgcaactttgacctcccgggctcaagcgatcctcctacctcagcctcccaaatagctgggatgagaggcacacaccaccacggttatctcatatgttttattacttttttgtagagatggagtctcactatgttagccagactggtctcgaacttctgggctccagtgaacctcctgtctcagagtcccaaagtgctgagattgcaggtgtgagccgccacgcccagcctatcttgttcttaatttaaaaagaacagttaagtttttgtaaaaaaaaaaaaaaaaaaaaaaaagtttttcaacctgtaatacccatttcaagtctgtgcgctttattaaatgctcacagtgatgatgatgacgatgggggtggtgatggggattataagcaccactatttgaatctgtcacatggtttctgattgagttcccagcacaactctaccttagcagaatgattaaggttcccatctcagctcatcactcaccaaactctgagaccttagttaaattgcatgatctcagtttccttgaatgtaaaacgtgaataatagttaaggttgttgcaaagactgaagatagatgatagatgtgaataaaatgacgcacacaaagtgctaagcaggttacctaaggctgctgcgtgttttcccctttctgcatctatggaaacaggctggagaggtccaggaacctggcccctggtccctggcaagcaaggggtggaaccaggattgcaacctcaggattcatgaccccaaaaccttcgtgcccctgagcactctgtcttgcagcaagcatttgggaggttgatatctgtaggccagtgttagattccatgctggcagctgccctgccaggatccgccttcgcctcttgatcctttcagtaagcccttaagtcttttagccaatctgggtgcccttttttgagcttgatccaatctaaatacgaccctagtgcctgtgaaattcacaagtcagcttagtcatagagtacatggtgtccagagttttatgaggtaggattatactttccctgtcacatgaggtaattctgctggggtgaacctgaagtggcattcatcttcattaatgtgacttgtgttacaaacacacatccagcatgtaatttactgccttgtcgggggtctgtcatctctgccttcaggtttctcacatttatacaaaaccagaaaaaaacaccctctacccttcttttcttacacttataaaatgggttgtggaattgaggcagatatccttaacacccccacccacacgcctcccatcgccaacacataatgacacagaaatgcccaaggtgtctgctgggaaaattacgatccttctccatctctcctgtttttgtgtgtaggtctggcttcaacccttttttctaacgtgcttccaattttctgttttgggcagtgcttatgttctcactgccctctgagttttgttaaacttcagaaccttgcatttcattcttggtgaaacttcattatgtttacagttctaataggagagaaaccttataatctagtgtgatgaactcaaacattttaatattgtgctgtcttcacatttcaaggtttgtgggaatggggggtgcacgtattgcattattttaaaattattaatgacagatttagggggtaagtctagcaggcgcatcctgacattttgtgaagaatggcgttgcattctcatttcttaaagactcaataactcagcataaaagtgtttggaattagatcagtctttcctagaatcttagtatttatctttacatcttacatacacatcccatcctgctttattttctacctacgtgctttcatatcattctcccgtacgagattacaaactcctttacagcagaaattgtgacctattcatatttgcatctctctacttgactcactcagtaactgctgattgaattgaatcttgacatttctgggccttgctgtacctgctttgtaaggattaattctgtttggcttataaagattgtggttatatctaattcaaagttgcaaaactgtttaaattttctcaaagttagtagccaaagcgactaatttagaaatgcataatttatgtacatatgtgttgctgtaaatagatgtgactgtttacatgcatgtctatactttataaataggaggggaagtgaacagttcgagcatgtgaaagatgcaggcgatggacccagggagtgttctttcattgctctgaataaggagggaggaggaacagtgccggagccaggaaggacagcagcttgtttccttggattattttgtttacatttggttcacacctacagaaaagaggaccattccaggttcatcaacatacaggcaaaggcagtgcatgacattggatttctttctgctgaaataaacaagctatggttagccgaaaggggtgggagattattttgagctcgtactgaatgcaggttgcacaaagttaaatagaataatccacactgttttaaaactatatgcctatattatcctgtttgctgcaatacaagctacagtgttttctgctcatgatccatgttttgatagttgctcattgctttgtgttggttgccataagtgcagtttacttattagctcaccctctcgttcatttgtaaaaggtagaactctgatcttaatacgtttatgttaagagaagaccctttttctttgatattgtccaaatgagaagagaatttccttcttggagtggtgaacaggaaggcttggaagggcagatggctaacctcgtgctgcatgtctccctggtgcagaaagtagatatgattatggatagagctgttctgagacaagataacatgttatttgcaatgtgagcccagcaacggctccccaaaagtgggaggagggatggagttgggttgtaagaaaattgagggttcctgggaaagtattccaagaatacaaattttatacttagaagacttcttgtaagaaagtgagtctaagaaagcagtcaggttcattcctctgaaaaacatgaaatgtgttacaaaaagccttatgatatggagtctgtctgacccccaccccactgctcttgcgaatgcttccagagattggggctcactggcgccccccggtggtattcaagccttctcctattttattgtttgggtaagacccctgtggtggtgaacggggtgggggcggtgaaaggggcaaacttcagtgtccagggttggaaggtgtatgtggtttttttaggttttcttcaagcgcctttgtcattgtttttctcatttgttttaggccaaagaactgccaactctgaaagataatgatttcattaatgagggccaaaagatttatattgatgacaacaacaagaaggtcttcctggaaaaactaaaaaaggatgttgaggtaagaacagtcagtggagaggccagactcattgtataaatatcagccctgttgggttttaggagctttttaaaccatctatttaaatcttcaatcaaggcaaaaacctgcatactctaccttagggaagtcagacatgaaggtgtctcatgttacatgatctggtttaaagcaaacgcatgccagtttagcagccctctcatttaggcaccaaacacaagaaagcacctgctgtcatccgctgggaatccccggtcccaggcccctgtattctgtattgggatggcccatgaagactgacctgcccacaccagccagtttgggaggggccaggggagtactggactctgtgtcaaccagcagagcatctcaaaaacaaatattcagtcactattacagtcttggcacttttccctctaaagcacaagtcagtgctggttaacatagcctgggtcacttaatgctttcctatctccaccagtcaccacaaaccatgtcatgaggcccagtgaggcccccttacacattgtgggactagcacaggggcagcttgggatactaggtcataggggacagtggagagacatagaacagtgtccaaggggctttcgtccataatgatggagttttgcttttaaacactgttctaaacatttaaaatgtaccttttcctgtcatttagtttatgataaaggcattgcagcttttccattggatttgctcattatttaagtcttttataaatccaggaaaaaaggaaaaaaaggttattttctttcctttcttttttttttttttttttttttgagatggattctcactgtcttctaggctggagtgcagtggcgcgatctcggctcactgcaagctctgcctcccaggttcacgccattctcccgcctcagcctcctgagtagctgggactacaggcacccgccaccacgcctggctaattttttgtatttttattagagacggggtttcaccgtgttagccaggatgatcttgatctcctgacctcgtgatccacccgcctctgcctcccaaagtgctgggattacaggcgtcagccaccaagcccggccaaaaaaaggttattttcttggacttcgttgagttacaaaacaatgcagtgggaattagaatttaggcagctactaaactcagcttttcttagctgttgctttcattcatttgtgtacacttcatggcacaccagtacggatctgctacttagagagaggctttgtgggaagattgtctttttatgtcattaaaccaaaaaaaaaaaaagaaaaagaaaatgacgaaagccacagaatgagtgtcatacatttgtatttcccatgaaggcggaagcagtataatttatttttaatcttctaacagttctttttattacaagaaactcacactgaccaagttattagtagttaatatttttagatcataaattagtttaataaaattttttacattattttacctttatagtatacatacttggattatttatagtatacatacttggattagaacctatatattggttatttgtgaagggtgtaagtatctactttcttgttgccattgtttttagagacagtcttgctgtgttggctagagtggggtggcatgagcatagctcactgcagccttgaactcccagctcaggcagtcctcccgcctcagcctccatagtagctgggactacaggcatgcaccacggtgcctggctaatttttgaatttttttttttttgtagagactagggtcttgctttgttgcgcaggctggtcttgaactcctggcctcaagcaatcctcccacctcagcctcccaaagtgctgtgattacaggcatgagccactgtgcttagcctgtaagcatctacttcaaacaaacaaaacgatacaagtgtttgcttttctcttctaacattttcctccagtctttcattaaggaatgtttagttttcctcagttgtgagtggttactaataaaatgtattagttaagcatttcccccttgctttgggatctgtttgatccaactgataagtatccttagtaaacatactcttggatttttattgattaatcagcaaatccttgatactgagaagaatatggttttagcaattatggtaagtagcccttagggttatctgtgacctattaaaaaaatggtttttttctgttggcagtatatcactatgatatttagactccagaaataatgtaattcaagcagttcaaatttacagttgaattacagaaggatcctcttagctcttttgttgtctctaataataccattgattagaggactctatagtctaatcccatacatggctcaagcacttagctgtttcgttgaaatggaggcagggtgtaaaacatcctttcatttaaaaatattctcaatagctgataacagtgtctttagttttgaaatttatgcagaaccatcattaaatttttaagcaggtaattatggtgaagtagcttgacatctgatcttgataatgaggctagaatttaatcgagttttctgttttcatcagttccatgctttctaatttagctgactgacccattggagtttcattgcagttttttgttgttgttgctgtttttccttaatgcctcgagtaggagatctgagtgtattacagctcaagaaatctagattttaggaaaactaattttcatctgaggttctagttgctgtttttctgtaacagcagccctgttctattcctatgccatgctgggtattttcatccacatagctttgcacgtaacacaggtgagtctttttctgcacacaaacacacacacagatcggtgtatgaggagtgacaagcacttttgccttctgccctgtgttttgtcaattctgatcacggccctgaagaatcaaccctggtctctcctctcattgactcacatgatgcaaaactgttctccctctgtggcatccaggagtaccccctcacagggcatttcagttgtctgaggtttatagccccccatccatggagatgggtgagaggggatagggcggtgggagtagtgggatgggtggcagcatttatggagcacatcgagcccaagtccttcccatgcagtgtcacttgtcattctcaaaacagccccttgacagtggtcctgcccctaccctagtttgatgaatggggaagccgagcccagagaccctatgtaatttgctcaaaggcacaaagcttctaaattcagactggggcgtcaggccctcagagggcacagtccttaactactctgacataaacacaagttaaaaatacctgtgagagcacagtggaggctttgttttctgataattgcttcgaaggaggattataatttttaacaagtggtaagatataaccgttaaacagggctgactggcattttaattctacttcacagatatgttgggagatggtgatgtggtagaacacggtgtgttagtagagttaaataaatcagttgagaaccattgtgaaggatagtcttagactcgtaaagatctcaaggaagattgtagctcaaagatttgtcacagcaaggactcaattagtaaggaattagatgagaagggatattctgagggaaaaagaggcagatgtgaggtccagcaggtggtttctgagaagctggaaaggaagaaaagcaggggacctaaataaagactgaaaaatcttcacactttgaaatcttatgttcttaaaacttaaagaacaaatatatactgttttcctgcagtgagccggaagcagaccccgcagtgaagcccacgccccctttctgtcttctctttccatctgcgagcttccagcccacgaaaaatctcagatgtattgccacacttcattcactctacctcagaacagatttaaagtaaagtttgaggcctgttgtggtggctcatgcctgtaatcccagcactttgggaggctgaggcaggaggattgattaagcccaggagtttgagaacagcctgggcaacatagtgagaccccatctctacaaagttttaaaaattagccaaacgtggtggtgcatgcctgtggtcctagctactagggaagctgaagcaggaggatcccttgagtccaagagtttgaggcttcagtgagccatgatcacaccactgcactccagcctgggtgacagagccagaccctgtctcaaaaagaaatttaacgttttgaagatgagagcccgtgaattaacaggcttttccatatggttctttttcccccggtctacaaactgaaacctgtttaaattgaaatcttgatattaaaaaaagacttctaccataatcaaaacattgccagttacaaataacagcttccattattttgtgtgaggcaccatattttttctctcagtttcattatcttaattcttcgacacccctgtgaggtgagtggcattgtccaattttaaagtcagaatgactgaagatccaggaggcgaactcgtcaagcatggaactggcgagtgagaccaaatcagactctttgtttcttgaatgggtctccctggtcagcatgacctgtccttttaaccactgtgccatatttggtttttcccatttctacctcagtctcagagatttgaaatcatgaataataatcccagcagtttgggaggccaaggcaggaggatcacttgaggccaggtgtttgagaccagcctggacaacacagcaagatcctgtctccacacaaaataaaaaataattagctgggcatggtggtgcacctctgtaatccagctcctcgggagggtgaggcaggaggattgcttgagcccaggagttcaaggctacagtgatctgtgatcataccactgtactccagcctgggcaacagagcaagatcccatctcttaaacaaaaagaaaacatgtgcaatgcccattgtgactgcaattttctcagtcttcttgggtgcctcagaacagcttcttacctagagatgcattttgcatcatgctgatggtttttgggttgtgctaggagttgactgcacctttatttcttcctcactggaagacgacaataagcggtctgaccacaggcctgaggcccaggaaaattactctgggctgcccggtgtggcgaggaacccagatggggtgccaggggaggctgggccctggaggctcaccctggtgagtgcggctggccagtcccagttgtccccttccctctctgccctttggcaagttaatcacagacagccctgacttctgtaactaaaacatacttgaaggtcaaccagtagaccttcctgttaaggtaatcgtcttaaatggtcaccttgcgcttcctttgcagagctgttgcctcatgcagtctcagacaaaagttttctgttgttgctttgttgtttgtatttggctttggtagttacttcctgctggaagcaggttggggagaattagggagagttgggacggatagggaagaagtaacaagcatcccattcacttgtccaacaagtgccgaatactttcccgagccctctgcctgccgggattcgggaatgcagtgaaagccaaaaccttagagccccgtttggggctgccttgcttgggaaagagagaagtcgctcaaatactccaacaaaatgaatgtgcagcgaggccccgtgtcactggggaggagtgtgcggtgccctaaacacccagactctggggctgtgctgccctgtgcagtgccccgcagctgagacctgaaggcacaggaggaagtacctgcccccagagaagcccaggaagtgggcagagcagagctcaagtgggccccagaagtggatggggccaagctctccaggcctcctgggccatgtgagttttgtttgtgccctgtgagaaacgcggcactatggaaatgtgttaagcagaacaggatgggatcaggttcacattttgaaaacttctgccctttgcagaggactggaggggtggttgaggcaccactcagcctttaccacttcacagggaccttccaagcacccagagggagcaggtgtgggcagaaggggggccttttccctgtcacctctcaagccgagcagggcctggcctggctccagagaggctttcaggtgtagagagagaggccagggaagccgtagatctagggagcagagccaggcaccgtgctatgcttgggaggggcagcagaggtggccaaggagaccctgacccagtccttcagcagcccagaagccttgggacaacagggcaaggagaaagtgggcccaccataagcacccccacccccacatacccctcagcattggagaagacaactggtacttacatgcatatttttcaataggcttttgaactcaggccccagtcattctgacggaaacaggttcatgatnnnnnnnnnnnnnnnnnnnncccccacccccaccatacccctcaagcattggagaagacaactgggtacttacaatgcagtatttttcaaataggcttctgaaaccccaggcccacaggtcattctgacgggaaagcaggttccatgatcacagcagtgccatgtgtgctgctgctggccacctaaccctccggagacccacagcgcagagtcatgtgtggagggcctccgatgccagctgattttaactcgttaccttcctcctagggttgcgaagaaaaggagaggggaaagctgctttaaggcagcctccagaggtagctgatagagagcagagagtacaggctcagaacaggccctgaattcacccctccttggatttgaatccttgcactctcgtccagctgctgagcctggctgctgtctcacacggagagcctgccccctgccttggatcttgtcacctgtccctataccccggagtgcccagttctcttccacatccacaggcccatgtatagcggagctggtacccgagacccagctccctggctggcttcaccgtgcgggtggaggactcaagtgagccttccaccactgtagatttctccccgcagccgcccccacaaacatgatcccagccaggtgatctcggccaggtgcacctcacagcctggcagctgccgagattctaggggaggatgcgcagtctctgactgctggaaaggaatctggcagagagaggtgcaagtggaaagtcagttctcatgtttactgtaatgggggagtttggggaaagaccaggggggatgagcagtggcttcccctcttctctgggacccagaaagctgaacgcaggagccccatgctgtttccacgaggggtttgcctctatttttaaacaaacaggtttctcccactttgcttaaatatttgagtgtaagatttgtgtgatttctcttttttgagctcaaaacaattggggaagatatagctggccctgggggattcctgttgggaaggcagcgaagtgggagctctggccagtttgctgggctgagcggggtgctggctgatggagaattgcaggcaccaggaaccagctggagagtgggatagccctgtgcccaggggtcctctcctcgtctgtaaggaatcggggcttctcattcagtttcgagacagaactccttcccagcaggctgaggagaaatgactctgcggggcttagcaaattgatttcatttttagccagaacttcaagacctgtgattttatctgtttgccctttgcatgaggacatctgcttcctaaattctatcagcatagcccagaggctgctcagccactctgcattccccagcgaggtggcactgagtccttccagagccaggaccgtgaaccttcctggaccctgagcccaaggtcagagtggaacaggatcctgtgcagagccagccagccacggggtcagggagccagttgggtccagcccgcagatgggctgccactgtttgcactcagcacaaccatccacatcttatggcaacattggaacgttgtgctgaaggtctcaaataagaaaagggaaacaaagagaaatcgtgatctgaaaagtcaaagaactgggcagacaggagtagccaaacacacagagctgggtcttgcccccacattatgttctagccacggctggaggaggagagggaggacaggaatcctggatgtgtggtgcttcgtggaaagcacacatggaaagcaccttgttgacctggacaggactgcattactcaccagatgtggacacagtgcctttacttttacttatttacaacagcgtaacaatcgcctccacagagcatgctgaattccagggtgctttcctgaactaccaccagagactccgctggaagctacttgggagatgcctgggtttccccattagccagtcttaatcattgggaggaacttgctctctctcccagtctctctccgcatctcttactggtcatgctccttgctatctggtgaaatccagccaccctgtgatagatacacacctctccgcatccagtgtggcattccagggtaaacagcctgagctctgagccagcctgaagtgtgaggctacattttagatagagaaacagcccaggagtgtaagagcatcgtgaaggaggcacccggcgcctctgctgccccaccccacagccttccctctgggtgtcacccgagcttgtctcctttaaatgttggcttttatgtttaaggtgtggctgactcaccctgttgcctctgtccccagtttctggcccagctgaagctcatggactacagtctgctggtgggaattcatgatgtggagagagccgaacaggaggaagtggagtgtgaggagaacgatggggaggaggagggcgagagcgatggcacccacccggtgggaacccccccagatagccccgggaatacactgaacagctcaccacccctggctcccggggagttcgatccgaacatcgacgtctatggaattaagtgccatgaaagtaagtttgattagtgtggaccctttttgcatgtgaagtggtttgactttggccttgttatctaccagtaagcactaccccagttatgagggtgctgcccggcagcactcatcctccaaactccaaagaaatggatttggggacaagagtatgttaaagctaaccgtgatctcagtgctgaaacataaggcgatcggacctttgaattctgtgatgttgagggaatacagcaaaaccacgaactatactatacatgtacaacacacctgtacatatgcacatacacactggcatacaacgtacgtgcacacacaacacaacatgcatgtacatatgcacacatacatgttcacaaataacatcagaaatgctttaaaatattaatacgtttttgcctagttatcttttttatctaagtcaaaagcatcatgagtctaagctaggcacatgcatgtgatcctctgtgacccttagcttgtcctcttgtcattaccaacagccctctccctctcaggggtgtgaagggtgtgtgaagatgggccctgtgggtggggtgggaatctgatttgctgctgagtctggctctgctgtcctcccccatggaagggcctatggccctcttccctagagtcagataaatcttaatccaccgtatccaggtgattgggtgcaccagttatttgaatattacatcctaccttagcaacttatccgtgacaataccaaaatatttttgtgataggataaaaacagcttcttggtttttgaataataaaaactgtggctcatcagttgttttttaatctcaaatggcatatcagctgaggatctgagttctgttttgttctgttttgctcaccaaaatgttttcttcaacacagaaaattagatagtcaaatgtacttttcttactgttcatatttttggaaatggatagaaaacagacacgggccgggcgcagtggttcatgcctgtaatcccagcactttgggaggccgcggcaggcagatcacctgaggtcatgagtttgagaccagcctgacctacatggagaaaccccatctctactaaaaatatgaaattagctgggcatagtgatgcatgcctgtaatcccggctactcggcaggctgaggcaggagtcacttgaactcgggaggtggaggttgctgtgagccaagatcgcaccattgcactccagcctgggcaacaagaacaaaactctgtctcaaaaaaagaaaatagacattggagtggatgtatgcctttatccagttctgatactgtatccagtgagaattatgaacagttctaccatttgatgtaaaggattagtgtacataattagttctgttttatagggtatttttaaatagcatatttcttcacaccaaagcaatacacaattattaaagaaaatgcaaattaaaaaaaaaaaaagactccgttccaccgttggatctccactgttgataccctggtgtgatgatgtttttagttgttagggttgtttctttttaaattgcagggggactgggtcagagaggcaagctgtgtgtttagtcaggatccgcaggggtggtgtagagtttgtctctggactccttccatccgcgttccattgaatcccctccctccaggctcacttctccctccctccctccctcagcagcaatgctggcactggtgttgtcacatgtcccacagtcattgctctcctgtctctgcagactcgcctaggaaggaggtgtacttcatggcaattattgacatccttactcattatgatgcaaaaaagaaagctgcccatgctgcaaaaactgttaaacatggcgtgagtatctccattttgtttccttctctctttctctccctctctctctctctctccctctctctctctctctctctctctcctggctcctctgtgtgacctgtaactcagggatcactcctttctgccactgagctgctttctactgagccattcaaagccctttagtgacgcttgttccctgggggcaagtcatgttctgagcgtaagatacagaacccacaaacgcttactgctcactgctgctcttaccacagctccctgtggcttccagcgaagtcacttaaacatgaacatctcttctttttacacatggcggacactaacaggcatgcgcatcactaggatgttacacaaattcttttttgtttgaaaaatgttccagagataaaagtgcaaaagaagataatgaagtgttctaatatgaaatattcaaaactgaagcatgattgtctgcttaagacacttcccaagtatacaggattaatatttcttttctcacagtgagttgtattttttctactacagaaatctcttgagtgcaaaatcaaagttgcataatattactcaccgttaatgttgcttgatgggagttttcactgctctagccatatgttaagctattttatcccccatgagaagcctatgaaagagatagtagtgtacctgcttttgtcagttggagaaactgaggaaaatagcttcaggagtaacttgccagggcctcatagtagcaagtggcagagatgagattcctcccccggacccagccccctcctggctctgtgttcatgctcatccccttgccctgcctgcaaacacctcctgcctggctgaactttacagctcgccaagtttcaggcttgtattgcagggtgccatctttgttttgcagaggtcctgaaagccatagagcccaccccacacagatgaatgtattccctggtttggtggccctggaagaaaaggtgcttcccacagactgtgtagaactaatgaagattcaccagaaccaaaaactcacttgaaacctcttcttttctattttaaaatagaaatcagcctaacaaacacagtattctatttgccaaagaaatatttcagtcacattgtcgatagctatggtattcctgctgtgtgcagagcacagactgggacctcaccgcccccgagcacgtcagtaagcaagtgtgcctggtggcttccccccaacagaaatttttgagtactctttttaaacaaacatccgcaccaggtgcaccacccccattccgtcatttctgaggccagttcaggagggtgagggaggggtcttcagaagactccatggtcattctgatgctcacctctggttgaaaaccatggagtgtggcaaagagagaactggcgaggaatcctcgtttgacccttcccacttgtatgacctcaaggggacacttttggagctcctgttttttcacctcatacagaaatcctactgccttgctgatggggttttgccagagatacaagagttgtctggacaaatgctttgtaaatgtctgttcccatattatacatcctgtgaaattggagtgtatcctagccaatatggctccatgttcatctctcctatcctagccaatatggctccatgttcatctccccataagccacaagttcgcctccatagtgtgccacacggcataaaatcacaggtagtttgcaagaagaaaacattactgtcagcaaaggaacgctgtgttaagctgctgtgggggaccattctctctgcattcaagcctgggctcctccatgcagccgaggcctggaaatattacaagttccccggtgaacatgggtgtctaaaaacagcacatgctcacttagcaaaactccgtgcttgccctttgcagctcaggaaactggccagtgagtgactcccttgagtgtgctggcctgcaccctgcatctcatcatggaaaaatccctcaccgtgcttctgcagggggccaggcttgcttgctctctgcagggctcagaaaggggaacagtggcacccctgtgtgctgctgcagagggaagtcagctccttcccccgtgggcaagatggagccagcagtgttgtgcctcacctggttacggtgcagggaatgggctgggggcagctgtcccagaacctgtggctgctgctgttgcccctcatgtttgagcactgagctgggggcctctgtccagaaacgaaggggtcctgaagaaatcatgcggttttaagtcatcgtcattaaggtttccctttcgccaaatgttgatgtcattctcaaggtggctccagtctgccttcttgaaaagtataacataagtattgtttccgtgacttctgaacaattccactctttgatagtaacatcccaaacgtggcctgtttgatttttttgtgagttgcaacagccccggtgtgtgtggtagcatctggtgctcctgtcgccctttgtctcatttgcagacacagatttgtaagaaccttgcttattcaaccatgagcgccaagatattttgagtgatgtttttcagagcagagactgcatggatttgaaaattgcttgctgtatattcagttgccattggaaatagctgtagatattgagtaataatttggggaaatcataaacactatgtcaatatttccttttttaaaaactgcccaggctggcgcggagatctccaccgtgaacccagaacagtattcaaagcgctttttggactttattggccacatcttgacgtaacctcctgcgcagcctcggacagacatgaacattggatggacagaggtggcttcggtgtaggaaaaatgaaaaccaaactcagtgaagtactcatcttgcaggaagcaaacctccttgtttacatcttcaggccaagatgactgatttgggggctactcgctttacagctacctgattttcccagcatcgttctagctatttctgactttgtgtatatgtgtgtgtgtgtgtgttgggggggggtgagtgtgtgcgcgcgtgtgcattttaaaagtcataaattaattaaaacagatccacttcggtcagtatgtgtcccaacaaagaccctttgattccagctatggccgaatgaatgagtgagtgagtgagtgagtgaatgaacacacgtgtgggggaggggagaaggaagtgcatgatgtcaggcaccgtgttggcatcacacaacaaactgtggatcagttttttttttttttttttttttttttggagttgaaagatgtgagacagtattcagaataatgaagataataatgatgattattataataatgatgatgattccaaggaaaaaacctacagcgaatgttccatttctaccccgcacgcagacactctccctaacactgataacctgagcccccagcactggacggaagaatgctggcgtctccgtgtgtactggttcagggttctggccccagccttgtcaggaccccctggtgtccagagcccccacccctcccgcaacaagcagctgatgccccagtgattctctatacatttttcacctcggccaatatgtccaggaaaactgcttacttctcttttcttgcctggagccttcattgttcacccttacgttgcaatataggaattaatgctacaaaataaaagtaaagcttacctgaaaagtgcatagtttggggcaatggtatctacatctcccactgtgggaaaaccagcaaagcatcaaaactctcaattctcctgttaccaaatgcagatctgaattataagatgtttatgtttgaccattgtttcaacaatgggattttgttacgaattatccctttaactgaaaccctcagttttactgtttacattattaggaaaacagggatatcttttgaatctaaaaatttgatgtacagcatgtgatttttgaagtttacatgtaaagtcacagtataggtgaaataacgtttgtcatattttgagacgtatcctgcagccatgtttttacgtgagtgttttagtcaaagtacatggtagacagtctttcacaataaaaggaaaaggattttttttcctccaaatgtacatttatcaacctaatgattgatttttttaaaaagagatttcgccccagtctggtttatgaaagttcattgccctaaactgtgctgattgtttttaatcaagttataaatttccaacctagatcatgtatctaccaactctcctgcattttccaaaaggcattgagcttaaatattagtcttgcttagagtaggttatccacttacatgctgcgctaaagccatgcctttgaaactccttgtttaaaacatgatatgatttttgtgggcagtttcagaaaagaaaacaaacaaacaaaaatcgaccctttaattattacttgcaactcaacagatctccctgccgtactgccttttccaggaactttacttcagggctgtccagattgcagttgtgccccgtgtatgtggatctagttcacagagtctttggaagccagcagtcgtgccctccgtatactgtccactcattttatgtagatttggtatcctcagcagccagtgttaacaccactgtcacgtagtgtacagattcatcttttatgtatttaaagtaatccatactatgatttggtttttccctgcaccattaattctggcatcagatcagtttttgtgttgtgaagttctactgtggtttgacccaagaccacaaccatgagaccctgaagtaaagataaggtacacatacattatttgagtaactgtttccttgggggccaatctgtgtatgcttttagaagtttacagaatgcttttatttttgtctataacaaacagtctgtcatttatttctgttgataaaccatttggacagagtgaggacgtttgccctgttatctcctagtgctaacaatacactccagtcatgagccgggctttacaaataaagcacttttgatgactcacaagatgaatccttttttcctctgtcccaattgtgtgtctctgttccaaacacattttaaatactcggtcctgacagtgtctttagctaatccttgaagaaataaaagtggaattgaatctttttagtttctagagccttgccttcagtttgggaattattttatcagtaataacaaacttccacaacacaattgactttgccgcaagatgaacaagtagaggaaaagaatctcttccatgaacatcctataaagtcatatgttttgtttttagctttgatacaccttaattctatgtgtatcaccattttttgaaacttccttgggataccattgatggatagcagacttaacggcattccacttggtgccaggttaacacagacagcttgtctatagcacttgctctgataactcatttttcttctaatgcaactgatgtattatagcaggggtccccaaaccccgggccacggaccggtactagtccatggcctgttaggaacctggctgcacagcaggaggtgagcagctggccagcattaccgcctatgccccgcctctttcagatcagcagcagcattagattctcataggagcgcgaaccctattgtgaactgcacatgggaggaatctaggttgagcactctttatgtgaatctaactaatgtctgatgatctgaggtggaacagtttcttcctaaaaccatctcctcagccccctgccagtccgtggaaaaactgtcttccacaaaaccagcccctggcaccaaaaagattggggaccaccatattagagaataatttgagcataatgcacttgtcacattgcttgtgtgccgtttggtctgcaaggaacattaggtgaatgcagagaactgcactcaactgagctgcatagggaaacacaacacaccgacacttcaaacatctccagcacctcacttcagtgcatgtgatttgttacactcgttcatatctggagttacacgtttccacctgacatcagatcacctttctcctctttacaataacccaagagctgccatccttctgatgcccacaaccacaggcgtgccttacatctttttcaaggtaacttgccctgtttttatattttgaatatttcctaaccagttagcgtttttataattgtgctactgtttttattagatttctttttcttttcagtgtgtgactcattacattttgggatgttgtggccctagtttcatttttcccagaagttctgtgatttccattgtgcagctttgcctaaagcagtgatttctaggaacatacatgttgcattattgtagaattgactgtggtcagcagggagctttaattcaatgttctttgtggactgtttgaatgtggacattcattttcccttcattttggttaagttcctggattagaatccacaatagttccagaaggttatttctaattcatggaagggcaaaagttggtatgaagcattaatcctgagcacaacacttttcaaaacagtggttaagagttaagtgcaagagattacaaactatatgttgtgaaatggtgatgtatatagtgtgcaaatgtacacaggccgagaggctgaacaaagactcaggaccgctgcacacaacctttcttggaatttttaaatagcacaaaatcagtgattggagtgactgttgtacacgtgcatctttcttcgagctctgaaaataactggcccccattccttcctataatatagatatattaaaagcataaaaattaatatagattgctatattaaaaacatagaagtcattcttcctaaagggcagaaactctgccatgtcttttgaattcctatgctaggctgggcacactggctcatacctgcagggggatcacttgaggccaggagtttgagaccagcctgggcaacctagagagatcctgttgctaaaaaaaaataacaattaaaattttaaaaaattagctgaatgtggtggtgcatacctgtagtcccagctactcaggacgctgaggcaggaggatctaattgagcctaggagtttgaggctgcagtgagctataatcacaccactgtactccagcctgggcgaacttgtcttttaaaaaaataataataattaaatagatagtgaattcctctcccgtagagtcacctgcatcgcctcatggagcctctggccagcctgccttcactccatattttcattattctgagctggtatctttataaacagttggcaaattgaaggggcagtcatagtaaagtagcccagaagaccaatgaagtgacccgggaaaattacagttgctaatttaacctagagtggtcattgaaaattatttcataggccgggcttggtggctcatgcctataatcccagcactttgggaggccaaggcgggtggatcacctgaggtcaggagtttgagaccagcctggccaacatggcaaaaccctgtctctactaaaaaatacaaaaattagctgggcacggtggcaggtacctgtaatcccagctactggggaggctgaggcaggagaatagcttgaaccccggagacggaggttgcagtgagccgagattgtgccattctactccagcctgggaaacagagcaagactctgtctcaaaaagaaaaaaaaagaaaaggaaaattatttcataaaagaaactcctgaggagtaaagtacctctttttcttaactgagtgcccttcagaagtttgtcctagttctgcttttggagttctgtgaaaatcctgccaaagagcaattaaatgccccaatctgtgattgtctctcaaacactctgtaaacactctgtttaatttcataagagaggggacaaaagattagaattctccagaatctactgtgatagatctttgtttttatagaatgttttatagaacttgttgctggaagagatgttacagatgagaagaccttggcccagagaagctaagtgacttcttcaaggtcagacagtggtcagtggcaaagctaagcttagaactcagctctctgccccaacttctaagagtggaatttgaatgcatgcgctatggacctggaacctcaccatttccctaatgagaattaatctgtattatcccattttcctaattctttccctgagtccaacagttttgtgggtttttaactgtctcttgatttttttaaatcaaggagtctcactggggaatataaaaatattcgtagacctacttaatggcactgtggacatggaacttgaaaatctgtcatgaatagatttcctgggtgcttctgaatggccagatttagaaaccactgtcttaagtagtgaagcactcccaatgatgactaaggggtttttttttttgttttgtttcctttttttttttttttttttttttttgagatgggcatttgctctgtcgcccaggctggagtgcagtagcctgaacataggtcactgcatccttgaactcctgggctcaagtgatcctccttcctcagcctttggagtagctaggactacaggagcatgccaccatgcccagctaagtttttaaattttttttgtagataaggaatcttgctacatcccccgtccatctccatctccctccccctctttctcccccttttttctgtactctctcctaatatatgaacaagttaacttctcattgattagagcaggagttagaaaattacagccttagggccaaatccaacccagaaaatgatttttattgtaaataaagttttattgaagcatagccacacctattgatttaatgttttctatggctgctttcaagccacagtggcagacatcatggtccacaaaacatgtaccatccagccctttacagcaaaggattactgatgcctgaaacagcctcgttttagtattacagtctaatttctgcaaagccgtgggcttcagctacagttgcttcacgtttttcctcagctgtgatataaaacaaagtttgagaaacatttcaagatgtgccaacaaaattgaatattaaaaacttggtgggatctggcaagatggccaaataggaacagctctggcctgcagctcccagcaagaccaatgtagaaggcagtgatttctgcatttccaactgaggtacccagttcatctcattgcgactggttaggcaatgggtgcagcccacggagggcaaacagaagccgggtggggcatcgcctcacccaggaagtgcaaggagctggaggacctccctcctccagccaaaaaaagccatgactgtgctacccagcctgcatactaagcttttcccacagtttttgcaatctgcagatcaggaggttccttcacgtgcctacaccaacagggccctgagctgcaagcacaaaaccgggcggctctttgggcagacaccaagctagctgcaggaggttttttttcgtaccccagtggcacttggaacccctgtgagacagaaccgttcattgccctggaaagggggctgaagacagggagccaagtggtctcactcagctgctcccactcccagggagcccagcaagctaagaatcactggcttaaaattctcattgccagcacagcagtctgaagtcagcctggaatgatcgagcttggtgcagggaggggtgtccaacattactgaggcttgagtaggcagttttcccctgacagcgctaaggaagcagggaagtttggactgggcagaattcaccacagcacggcaaagcagctatggccagactgcctctctagattcctcctcactgggcagggcatctctgaaagaaaggcagcagccccagtcaggggcttacagatgaaactcccatctccctgggacagaacacctgagggaaggggcagctatgggcacagcttcagcagacctaaacattcctgcctgctggctctgaagagaacagcagatctcccagcacagccctcaagttcggctaatggacagactgcctcctcaagtgggtccctgacccctatgcctgctgactgggaaagacctcccaacaggggtcaacagacacctcatacaggagagctccggctggcatcaggccggtgcccctctgggactaagcctccagaggaaggagcaggcagctatcttggctgttctgtagccaccactggagatacccaggtgaagagggtctggagtagaccgccagcaaaatgcagcaacttgcagaagaggggcctgacttttagaagaaacactaacagaaagcaacaacataaacaaaaggcccacacacaaaaatcccatccaagggtcatcagcctcaaagatcaaaggtagataaatccacgaaggtgaggaaaaaccagcacataaatgctgaaaattccaaaaaccagaatgcctcctctcctccaaatgatcataactcttctccagcaagggcacaaaactggatggagaatgagattgacgaattgacagaagtaagcttccgaaggtgagtaataaactcctctgagctaaaggagcaaattggataaagagtcaagacccattggtgtgctatattcaggagacccatctcatgtgcaaagatgcacataggctcaaaataaagggatggaggaatatttaccaagcaaacggaaagcaaaaaaaaaaaaaaaaagcaggaattgcaatcctagtctcttgtaaaagagactggcaatccttgttacttataaaacagactttaaaccaacaaagatcaaacaagacaaagaaggacattacgtaatggtaaagggatcaatgcaacaaaaccaactatcctaaatatatatgcacccaatacaagagaaccaaattcataaaacaagttcacctactggttgtgtttttctggtggagttttgactaaaacagcctctcagatgttccagactttttctgataacaagggaagaagcacctctggaaggatggagtaaaggcctctaagctcttcctcaggaggcttaaatgctactgctgctgccaccatcctgtctctagtgccctctgaaaagttccagcacattttttaagtactcaacaccaacactgatgggcaatggaaaatagcttttgtcatcattcccattaaggatgaagggcgaagatgtgctcttgtattaaggacaattcgtagaaagtgtccttaagaaagcctagattttggacttgttaaataataactttaaatcagccattataaatatattcaaagaactaggaaactatgcctaaagagttaaaggggccagacactgtggctcacgcctgtaatccctgtactttgggaggccgaggcaggcagatcacttgaggtcaggagttcaaggccaacgtggtgaaaccttgtctctactaaaagttaaaaaaaaaaaatagctgggcatggtggcgggtgcccgtattctcagcaagtagagaggctcagggaggagaatcgctttaacccgggagatgggggttgcagtgagcagagaccgtgccactgtataccagcctgggcaatagagtgagactccatctcaaaaaaaaaaaaaagagttaaatgaaagtaggaaaattatatcttaagaaatggagaatttcaatacataaattaaaattattcaaaagaatccatagaaattcaggaggtgaaaagcataataattagagcaaaaaaaattactacaagggtacaacagcaaatatgaactggcagaagaaagcaagcaaacttaaaggtccattgagattatccagtctaggaaaaaaagaaaaaaatgaaggaaaatgagcagccttagagactgatgggatatcaaacataccactgtataaataatgagagttccagaggaagaggggagagagaaaggaatagaagaaatatgtgaagaaataatggccgagggaattttaagaaatttacagatagaaatatgtagaaattaaataacatttcctgaaaacccagtgggttaaagaagaaatcacaagggaaattctaagatactttgaagtgaatgaaaacaaaaacacacatgccaaaacttctcagatgcagccaaaatcatgcttagaggaaaattttttcaactctaagtaactatattgaaaactaaaaaatctcaaagcctttattcataaacagcctgatgatcttaatagatgcaggaaaagcaccggacaaaatcctttcataaaatattcaacaaattacgaataaagggcaactcccttaacctccatggacatctatgaaaaactcacagccagcattgcacttaatcctgaaagactgaatattttcctcctgagatcaggaacaagacaaggataaccactcttgccacctctactcagcatttgtcttaattagtttggactgctataataaattaccatagactggtggcttaaacaacatttatttctcacatttctggagactagaagtctgagactgagtgccagcatggtcaagttcttgatgagtacccttttctgtagagaaagtaagactttttctagttgcagatgacatgatcttacatataaaaaatcttaaggaatccaccagaagaaactaatagggctaacaagttcagtaagattgcagggtacaagatcaataaacaaaaagcaattttatttctatgctagcaatgaacaatctgaaaattgaagacaattgtatttataataacatggataaagtttttaaatctgaaaataaacttagcccaaaagtgtaaaacttgtagactgaaaacaataaaacatcattaaaagaaattaaagaagacctaataagttgaaagatatcctatatttatggaaagcataacgtcattaagatagcaatactccagatttaatccagtttctatctaaatccctgcaggctgctttgcagaaattgacaaacttatcctaaaattgtatggaaatgcaagggacccagaatagccaaaacaatcttgaaaagtacaaagttgaaggatgcacacttttagatttcacagttacagaaatacagcaatcaaaagtgtgga

SEQ ID NO: 499 - DNA, 1664 bp, Homo sapiens
ggcggcgggcggagcggagcgcggcgcgccggggccgccgccggggggatgcggctgcctccccgggccggggtgtagagagggcgggtccccggcctcgggagcacggcggtggaggggacataggaggcggccatggcgacccccggcaacctagggtcctccgtcctggcgagcaagaccaagaccaagaagaagcacttcgtagcgcagaaagtgaagctgtttcgggccagcgacccgctgctcagcgtcctcatgtggggggtaaaccactcgatcaatgaactgagccatgttcaaatccctgttatgttgatgccagatgacttcaaagcctattcaaaaataaaggtggacaatcacctttttaacaaagaaaacatgccgagccatttcaagtttaaggaatactgcccgatggtcttccgtaacctgcgggagaggtttggaattgatgatcaagatttccagaattccctgaccaggagcgcacccctccccaacgactcccaggcccgcagtggagctcgttttcacacttcctacgacaaaagatacatcatcaagactattaccagtgaagacgtggccgaaatgcacaacatcctgaagaaataccaccagtacatagtggaatgtcatgggatcacccttcttccccagttcttgggcatgtaccggcttaatgttgatggagttgaaatatatgtgatagttacaagaaatgtattcagccaccgtttgtctgtgtataggaaatacgacttaaagggctctacagtggctagagaagctagtgacaaagaaaaggccaaagaactgccaactctgaaagataatgatttcattaatgagggccaaaagatttatattgatgacaacaacaagaaggtcttcctggaaaaactaaaaaaggatgttgagtttctggcccagctgaagctcatggactacagtctgctggtgggaattcatgatgtggagagagccgaacaggaggaagtggagtgtgaggagaacgatggggaggaggagggcgagagcgatggcacccacccggtgggaacccccccagatagccccgggaatacactgaacagctcaccacccctggctcccggggagttcgatccgaacatcgacgtctatggaattaagtgccatgaaaactcgcctaggaaggaggtgtacttcatggcaattattgacatccttactcattatgatgcaaaaaagaaagctgcccatgctgcaaaaactgttaaacatggcgctggcgcggagatctccaccgtgaacccagaacagtattcaaagcgctttttggactttattggccacatcttgacgtaacctcctgcgcagcctcggacagacatgaacattggatggacagaggtggcttcggtgtaggaaaaatgaaaaccaaactcagtgaagtactcatcttgcaggaagcaaacctccttgtttacatcttcaggccaagatgactgatttgggggctactcgctttacagctacctgattttcccagcatcgttctagctatttctgactttgtgtatatgtgtgtgtgtgtgtgttgggggggggtgagtgtgtgcgcgcgtgtgcattttaaaagtcataaattaattaaaacagatccacttcggtca

SEQ ID NO: 500 - protein, 406 aa, Homo sapiens
MATPGNLGSSVLASKTKTKKKHFVAQKVKLFRASDPLLSVLMWGVNHSINELSHVQIPVMLMPDDFKAYSKIKVDNHLFNKENMPSHFKFKEYCPMVFRNLRERFGIDDQDFQNSLTRSAPLPNDSQARSGARFHTSYDKRYIIKTITSEDVAEMHNILKKYHQYIVECHGITLLPQFLGMYRLNVDGVEIYVIVTRNVFSHRLSVYRKYDLKGSTVAREASDKEKAKELPTLKDNDFINEGQKIYIDDNNKKVFLEKLKKDVEFLAQLKLMDYSLLVGIHDVERAEQEEVECEENDGEEEGESDGTHPVGTPPDSPGNTLNSSPPLAPGEFDPNIDVYGIKCHENSPRKEVYFMAIIDILTHYDAKKKAAHAAKTVKHGAGAEISTVNPEQYSKRFLDFIGHILT

SEQ ID NO: 501 - DNA, 23603 bp, Mus musculus
  misc_feature (1)...(23603): n = A,T,C or G
gagagatagctcagtcctcctggtaaagcctttatttctattgccatccaaaaggccccaaggcactctctctggcttataccaagattcaagttttcctgctgaagttaaaaaaaaaaaaaaaaaaaaaaaggcattgcttcagttatcaagcacagatctgtagagaaagtcaactcttgtgggaacccacttccaccatgacctgtggcactaagactggtgttagtatgcagaaaggggagatgggtgcctccagtctgcatccgagaaagcattcccggggctggagggatggctaagcggctaaggatacttgctgccgttgcagaagacatgagttcggttcctagctcccctcactgggttcaccctagttcacatcttatctcaatatctttccattagattgtgttttaccttgcatagcagctgaatatctacaccactgttgtattttggctacatatatattgcaatatgtgtcatgcatatacagtatatagaggtttaaaatttcttttttcttttttagtctttattctttttttggacttgcctggcaataattttttttttttgctttatttttaagatgacaaataagtttcaagaagtttatttcctttttttttttttttttttttttttttgctatttaaatacaaagctaagccacaaactggtacaaccaagacatttttatctcacagttacaccctcctgttgggtcctcctccaaatctgaccactgactgggctagcaaagggtgcagggaagactttcttaggtagcaacatcaggagtgttggggacaaggctaggttcttatccctggctcctgaaccccagtcccctggactgaaggtgaatggtgagtcctccccagggagggagaaggaagccacctactctcgctctcacaggtcaaaactgaagcatcaccctggttctctggctgctaagtcttgctggctgccaggtaccctagtgccaaacacatctggtgcctgatgctcgcaggggccctagactgccagcatcttcctgggataccaggggttctgccttgacatcaggcggagaacttcccacacagcagaactggggttcggtagggggtgtgggcttagtaatttagtaattacttagtaattttgggccctctacaaaacctcacttttgactggaatagagtaccatcgccaatcttctctacacaaaccaaccagccaaggcaaaaagaaaaataaaccccagaagaaaagaaaaacacattcatctcattcctttcaaaactatacattccctatatagatgttaagttggtttcttccatatttttctttcttttttatttttaatttttttattattattataaaaaataaattcagtgttcataattctataaagaattagtgcagtttcaggagacctgcccttttgggggcagaacagtgctttttcccagcccgcctctagtctgactgcccatcctgatgcttcaaggtgcctggaaaagctgtaagcctgtggaagaggtctgttcctggccaggcctctgagccgcgggctcagtaagctttggagtaagcagagggggagaccagcttactgtgaaactcttactaaaaaggtattcatacacgtacgtgtgtacgcctgtcaagactctgagaacaagagctaggagacttccggtccaggctaagcgtgggggtggcagtaccctcacaccggcctgacttggatgtgcgaacctcacctcacctcatcctcatggcctcccgagatgtcgcagctgggaggaggcactaaccacatagcatccctgcctccctgacacccagcctccttcaaaagacaaagtgccctcaaagggaaattaattttacacacacacacacacacacacacacacacacacacacacacactcttactcttggctaattattttcaaatgattttaaaagtatattaaagatgccttttcatgtagtatttacatatctgttacaggcttccaaggtggacgtgaactgacggccttatggcaccaaaacttttatattttagttggttttgtacctttttgcacacaagctgaacgtccatgcttcccgcacagtgtaaggattggcacaagttttagagaatggagttgaacgtgagctaggaagctgggctctgcccaagatgaaagctaggacttcccccacatcctacgtccaaggacagagttttaaattttcaatagtcgaatctaataatattttctgatttctgttctgtttcacatttagtaagtccctttcctgctcgatactaacaaaatagagccgattccttctgtctttatatagtctcattttacatttaaatctctgtttattttgtttacgatgttaggggcacagctttattcttccctatgaagacagatgtcctaaaatgggagttaaaaataactcccgttttttccactgctttaaaaatatttatttattttatatgtgtgagtatttagcctgcatgtacatatgtgtgcctgctgctcatggaaagaagccattggattccctggaactggagttacagatggttgtaaaccaccatatgagtgctgggtatcaaagcccaggtgtcctggaagagcagccaatgctcttaacccctgaaccagctctctagccacttgcctgttttaaagtgttactttaaatcactcaacaaactctcatgtatatttgggatctggcttttatgtccacttcttttaaaaacatttattattattttacgtgtatgggtatgtgtgtgtgcatgcacagctcgcatgtctctgcagcacatatgtgcctggtgcctgaggataccagaagagggcatctcatctcctggaactggagttgcagagggttgtgagccaccatgaggacgctgggaaacaaacctgtgtcttctgtgagagcagttgtcgctcttcacctctgagccttcttgtctgtttttcctgtctgtcccgtcaccattacaacataggtgactctaactttttactagtatgtttaagaatccgtatgagccatgtggtggcatatgccttaggcagaggtagatggatcgctgtgtttgaggccagcctggtttacagaataagttccaggacagccagggctacatagtgagaccctatctttaaaactaaataataacaataataaaaaagaatatatatgaacaagtttatctttagttcctttgttttcagagctttccaagctattattacaaaacaactgtattacaatataatatgtatactctatgattctcccacttaaagcgccaacagatatttatatgttcacagatgtgcaaccaccaccatgtcctatttagtatatttccagcaaggatgcttctttctgtagtggatggtggttaaagcattgactcacagctgctcaaagaactgagaataagggactgtggcatctgaggctcaagagacatcgtgacaaatgggcaggaagaatgtaagagccaggaacttggagggagcattgtgaatctgtgtcttttgacgtaccatgggcaatttgctcaccaacccactgcaactgttgttaccgcacaagattggacccccttccatttcaccatgcttgggctcacaaggctccacccttcactgagggactatggacaagttaaggggtgctgggaaagggagtgccatttctttcagtggtatagctactgctaaattgcccatgttcctataattgcccccatcctcatagtcatgcacgtaacttactaaacttggtggtcacacatacagggaaagacctggaagcaggagggaactcgctgggaggagaaggttcagtgtgacagagaaggggatgagaggtggccctggatgctataagaaagctgaggaagacatggaggggaatgagaagcatggagtggcataggggtggccaaaatttaggtattcgtgtatttaagtcatcaaagaataattttaaaagatcacttgggaaataaaactcttgaaatgaaaaacattgaaaaccaaagggctgagacaaatctccatgacttcttaggggtttgattgctgtgataaagaacatggccaacagcacctgaaggggtagagggattatttcaccttaagcttccagcttcagtccatcacggaaggaagttagggcaggaactcaaggcgggaactgaggaagaggccatggagggatgctgcttactggcttgatctaagtcatcacctgatcttcatgtacatacaatggccccacaataaacaaacaaataataaatgtacgaaacatgcagtgcttgcctgtctgagcttggtttatcttattgaacataatgattcccagttcacccactttcctgtaaatgcaatgatatcatttttcttatggctgaataaaattcctttgtatatcgatacactatattttcttcatcctcatgtgttgatggacacccaagctggcttccatattggcttttgtgaacagtgtactaatcactatagacatgcaagcatctctgtgatgagctgattcaagaatccttcaggcaaaaatacccaggagagggtagagttgggtcacatggtactagtatttgttgttgttgcagtatctgcccactgactagtgaacttatatttttcaattcttttgtgtatatacttaggagaggattgttagatcacatgatagttttcacttactgagaaatctcaaagttgttgtccatgatgtatgcaccattttgtcttctatgagcaatgcacgaggtctctgattttttcccatctcctcactgagacttgtggttttcttctgttttggttgatatcaactctagtcattccagtaactgtgaagtgatatctcactgtggcttgattcttcatcctctgaaggtcagtgatgttgagagtctttttctccatttatctggacacccatacatcttctttgaagaaatttctattccagttctctgtccatttttaagttgggctatttattgagtggtgagagttgtatgttttcctgagtgttcttgagcatttgttcttcttttttaaaaattcatttatttattatatttaagtacactgttgctgtcttcagacataccagaagagggcatcagatcccattacagatggttttgagcaaccatgtggttgttgggaattgaactctggacctctggaagagcagtcagtattaaccactgagccatctcaccagcccaagcatttgtttttcaactggaacttcatcaagcgtggctggtgtggtggtttgaatacgcttggcccatgggaaagggcactgttttggaggaggtgtggccttgttagatgaagtgtgtcactgtgtagccaggctttgagggctcctatgctcaagctctgctcactgtggaatgaaaccttcctcctggctgtctgcagaagacactctcctggctgccttttgattaagactgagagcactcagttccttctagtgttgccatgcttcctaccatgatgataatggattgaacctctgaaaaattaagccagcctcaattagatgttgtcctttataaacgttatcttgatcatggcatttcttcacagcaatgaaaccctaactaagacagctagcaacttaaaaaataaattaaaattgagggctgaagagatggctcagtggttaagagcattagctgttcttctagagaacctgggttcaattcccagcactcacatggcagctcacaattgtctgtccagttccagggtatctggcaccctcacacaggcaaaatactaatgcacataaaataaataaatcttaaacaaaaaattaaaattgtatgagtgtgtgtgtaaaggcactgtatacatgcagaattcagagaaataattccaggagttggtttttgtctactaccatgtgcctcctggtgtccaaacacaggtcttcaggcttgacagacagggcctttaactgttaagccatcttgcctgccaaagttagcaaacttcaaagtaaaagaaaaaaaaaaaaaccttcagctgaggacgtagctcagtggtaggacatagaccatttactcatgaacaaggctctagtttccatccccagtaacacacacacacacacacacacacacacacacagaagcacatataataggttcttcagaaatattccctaaacaactggacagatgtaggcatgcagtgtggagttggtataaactccacttgcatgcatgaagacctcctggcacagggtccccctggggatggatgtgcatatgggcttgtcactgtactagaatgacttatttgaacatagtgttgactcagagacaaggctggcaacccctttcttaccctgctagaggttactactgcataggatcaggggctcctttcttcctgggctcagtctaattcccagctctggccttgagtgtggctgggttttgtgggggaggaggatagcttcccacattctttagtccttggggacatctgaaaaggaatctggtgtccttcctgccagttatttagtctgaaagtgaagcaagcattctttagatcaatactttcaagtctctttggggttgagtctctgtcccaggctggagactaatagactgtttctctctcccaaatggttattaacccttgtagataggatgatgtagggtagtttcaaaactaaatacctgtttgtagcagcattgaggaatgaacctagggcaacaggcttgttggtaagctctcttctattccagagctacattttccacacagctttcaccttacacaagaaaattaaataaagtctgtgtgcatatgtgcatgtgtgtatgtgtgcatgtgtatgtgtgtatgtgtgtgtgcatgcacacatgtatggccatgctcagcatcttcaggaatcttagagggtcaaactcagccttcacttttacacagcaagaactcttacccactgagctgcccctcctcaccccagttccctacttttaaatgttggaacagtttctaagttgcccagtctagccttgagtccattttgtagaacaggaaggccttgaacttgtgatccccctgctccagctccctgagtggtctaggttgggtcaatggctttatgagaacacggaagcaccaagcagggatacactgttggacttgtcatgtgatgccctgagctatgtgggactctgcagagacactcagacaaagccacctgatccttaccttcctagtccagagatgaatgacaattttgtcttatcttttttttccttcttccttttatatttttaaagttaggaactcactgttacccaggctgccagaactcactatgtagcacaggatagcccttaactttggatagtgttctcttgcctcagcttttcatgtgccaggactacaggtatgcaccgcttcacattagctgattgatctatctttgtggcaggttctcactgtgtatgcatggttggcttagaactggaagtataaaacaggctggctttgaactcacagagatctacctgtctttgcctctgtctgctagaattaaaggcacgggataccatatgccacctaaattttagtctttattctttttaatgtttttacatgtgggtgttttgcctgcatgtatgtctgtgtaccacaagcatgcctggatcccccaaggccagaagaaggcattgggtccccgatgcctaaagctacaaacagctgtgaactatcatttgggtgctgggaactgaacatgggtcctctgaaagagcaggtgttctatactgctgagtcatctcttcagccctaagctttttttcctttattaatgactgtggtgttcccatatagctataggaaatagggcagcgtgcttttcagcagttcacaatacacgacagtgtgaagtctagcaaggactcacagtgcacatagcaaagccccaggtgcagggacaggccttgctactgtctttagtatttttttttaaatataatcttaattagaattgatgtccattgaaacttgtgctgattttgaacagtgtactatatgatgactaacaagttgttattttagaaaattcgagacgacaaaaaaggaagcggaagaaagaagtgctggggcaatcatttgtgataaagaaatactgtagaattatttgtttgttctctgcagtattttatagatgcaacaagggtccagttagtcattatctatgtttctcacactagagatcaagtaataagtaagatgctttgaaacattcaatgtatgcaatactgttactgttgaaatctgtcaagcgtgcaaagaagtaaaaaaccgactctgttgttctgtcggtaccgttgttctgttggttcggctgttctgttggtagcgctgttctgttggtactgttgcatgagacgctgccttttgcatttgtttgcctctcactgcgtgtgacatcctgcatccagcttgcctcacactcttctttcactaatcacagaaatggaggaggaggcttcattattaatatcatcctaatagataataaacggacccaaggtagaagggttaaagggcacccctgcctgtgttcatgtgggacaatgttagcagggggctgtctaggtatcagcacagtgccccatcctacgcctgagggtaccctaccacggatgttgttgttcaaaacaaacatcgaggagaatcaatctggaattcggcctcgattcttctaaaaatactttattgaatgtcactaaattcctgtccacagttcaggttgtgttcagtttgctcttatagggcccctaaaattgcaaattctccgagttgagttctagcatactggttctgggtgttacatggactatatgatctagatagacatcggttcttcatgacctgcccgtgcttctccatttctgtctcagcacatcctcttcagatgcttatgttctgatagaatgctgtgtgaatgtgccaactgtgaggtgactgtttaggattttaagccaggtcacagacttcagcttgttggtgttgggaactggtgagaagcctaagaggttacacacctgttgtcacattgggagagtgaacatgggttgtttgggcactgtggcaaatagcctctcgttcaagatatcaaaatgtctaggaatttccccagcccactgcaatgtgtcaaaccctgtggaaaatagcctcttgttcgagatatcaaaatgtctaggaatttccccagcccactgcaatgtgtcaaacccagggccttgggcttgtatggcaggtgatgccatcccactcagtcgcaaagttagccccagaatttctgatttctcagagaatccatgagtctggattttggataaatcttaacacatttgtttgttttgagaaacaaggaagcctaggttggcttaggacacatgtagctcagagtagccacccactcatggctaatttcctgcgtcaacctcctcagtgctggtgtccggaggcttcgtgaatcttaagaattagttcagccacaggataatcccacatagacaaaacatcgtggccttatgtagaataaggagagcgtaattgggattcccgtctatgctgtaccacttagtggagcccggacttccccatccccatccctcctgcccagggagccgtccctgctccctgccccctgccccctcttctgctccccagaagaaaatcttcatcctgcccagtaggatttaaactgagtgagcagcactggctgagcggatctgggaggtcctgtggaggaggtgggtttgtgtctagggagtgttgggagaaaactggctcacacaggcgtgaggaaggcggggccctggcatcgctgcccagcctctggcgacctcaatctccaggctgaaacgaccagttgttttcagccttcccctctgacctgctactccgggcattgttttctgttctcccagagttgtaggtggcaggcgaaaaacgcctagattctggctgctctccaggaccgtgaccttcggctctggggccactgggcagccgcgccttttggacgggaggagagaggaagcagaggactcctggttcccctggctgctcgtctcctcctgtggctctgccatgggctcacgaagctctcatatcgcgctcattccagacgtggagcacattcgcagagagacaggctgtgagtatgggtgctggtagtggtggtggtcagcgcagcccagtagttcgtgggcgggcacaggaggaggtttagtgtagtgtagtgttttgtgtgtgtgtgtgtgtgtgtgtgtgtgtgtgtgtgtgtgtgtgtgtgtgtcactagaatgtagcttgagtattccagatcgcagagacttagagggtttggaatctgagtctgggaatttgcgcctctggagctgggaaaccgagacccagtgtccgggttcgcaaggtacctgagagccaagtttgaggcagtccgggttgatggaccagattcactcaggtgtctttgagctcggctggaggctgaaggctgagctgaggacagatgcagggggagctatatcctgggctctgggaacttcctgggttctccaacctagtgttttctggagccaagctttctccagcagagtcgactccacacacctggtcttgcaaagggtaactctctccctttatcctcgcccgtgagcttcttccttgtggttgaagctgcgctgagggtggagagatagaagacccttttatgttggggggggggcgttaaagatgagaataagccctcttgttcctcgcccacgccccctggccggggtttctacagcgcaccccaagtcacaaggggcctggcaataaagacctgtgagtcctctgcggactcatccccacctcctctccgcagtctcgcaagccagcctgctccgcctctaccaccggttccaagccctggacagggatgaaaagggcttcctaaggtgagcagaacagatcttaagatcttttgcctctgttttttctggccccatcccctcactgacacctccatctgcctccttttttgccttccttgctttgtcttcacagccgcctagacctccagcagatcggagcactggctgtgaatccactgggtgaccgcattatagacagcttcttccccaacgggtgaagtctctactggctgaccggaggggaaatggacgtgggtgggaggtgaggcttcagatggtggcagcttgggtgaccattgaccttctccatccctgtccctctagaagtcagagactgtatttcgcaggctttgccagggtcctggcttattttcgacctatagatgaagaagatgccacactccgagaccccaagcaacctgaacccctaaacagcagaatgaacaaactgcgctgnnnnnnnnnnnnnnnnnnnnnnnnnnnnnnnnnnnnnnnnnnnnnnnnnnnnnnnnnnnnnnnnnnnnnnnnnnnnnnnnnnnnnnnnnnncccccccccccgtgagcctggtgaggacttattgtcagctcaggagcctcacttccttttccctctcctttcccagttgcatttcagctctatgatctggatcgggatgggaagatctccaggaatgaaatgctacaggtcagaagaccatggctgcatcagatgtgatgtgggcagggcaggatggttaaatggaggtgtgtgtgtgtgtgtgtgtgtgtgtgtgtgtgtgtgtgtgtgtgtgtatgatgactggggttgcaaatgattgtgtgttaggtaagacctgagatgggctggggttgggttagttaggacaaggggtggggaggaaataggtaagagactgggaatagagctcagattcccaacttgggagtaatgccgcctcttgccagtatctgagatacttggttgtcattaccgggaagagatcacccaatcgatttttaccaggaatgggccagcaatactgctatacacacccaaacacctaggacagccttccacatcaaggacttatctaggtccaaatgtcattagtgccaagactctgggatagatgataaagttagggtggagagtaaggtgttgtagagtggaggatgggtgtcgattgggctatacaactagacagtgacacagtgccaggcatttactacaggctgtaggggaaattgagtttgatggtgaaaagtgcgtgagaaaaaaattggttataacttacgggatgaggtgggcaaggctggggctggaggagcagcctctgtggctcttctctctgactgcctcttctctcccctcccaggttctccgcctcatggttggggtccaggtgacggatgagcagctggagagcatcacagaccgtacagtgcaggaagctgatgaggacggggatggggctgtgtccttcctggagttcaccaaggttaggaggggttgagatcaggagtgcctgggacagaagggtagggaaatacaattaactggaggatgggagagaccggggagaggtgcattctgggagatgctaggactccaggggaggggttgagattcaagcctcttgtcttgacctcgcccatctctccccagtccttagagaagatgaacatcgaacaaaaaatgagcatccggatcctgaagtgacccctgtgtctgactcacgtagacgtctgtgggcttgggatttacctacctgggtcccctggaggcaggatcccacaagccatattctactttgaaactttgcttagggctaggaaaggaagttggaagaatgtgtgctgaagtctcatttgctctcagatttgtgaatcactcagtgatttggttgcaagtggctgaaaggccaacccaaagtgacctgattaaaaaaaaaaaacgtgagaagagtgacacacgcctgtgactagacagcctggaagtagttgcctttagggacagctggatccaaggacaagcatggtgtcaccagaattgagttttgtcacctggggttctcagcttggctgcctccttgcattgggatcattttttgggggtacaaagggccgacagctatccagattaacatctgcttagcacactaacccagaggaagagttgtcttactccagaaatgccaaccaagcagcatcattgacccagctgggtcttttctctatctccaggggaatggaacatccaaaaaagctatgcctgtgtcatataataattccaaaaccttgaaataatgcctgaagtcttagcatagagtgagaggtggttgccttaaggaaaatgaagtaatgttatcagaaaaatgtgtgtgtgtgtgtgtgtgtgtttatgttggttttgttcgggcaacgtgaatgatgcatctctttgctacttggttgagcaaattaagggaatcttgaaatatggcctcttgaatgggttttctctgatccccttgatgaaagataatatgatggggttggtggctggtgggaggatggggtacagtaatttaaaccatacttattttcctaaagtatatgggtactccaaggtttgcagaataattcgttgtgctcatggtaagaagttcaaacattgtcagactgcagaaaagagtatacaagtcactttgaggcagaatagaagcacatacacagacacaagatatagagatagtgatgtgatatatatatgtatatatatatatatatatatatatatatatatatatatatatatatatcaagctgtggaattttcctactcaaagactattgcttttatttagagatctttcaaataacaatgtaaaaattggggctagagagatggatcagcctttaagagcactcactgctctttcagaggacccaaggtcagtttctagtacccacattggatggctcagaacaacttgttactcaagtttcagggaatctgatgcccttttctggtcttcaaagatattgcatgtatgttgtaaatacaggcaagcgaccacaaacatataagtaaaaacttttaaaaagttaaaatagcaacaaaatatgcttgtggtggtttgaatatgcttggcccagtgtgtggcactattaggaggtatggccttgttggagtaggtgtggccttgttaaagggagtatgtcactgtggggggtggggggtgggggggaggctttgagcccctcctcctggccacatggaggccagtcttctgtttgccttcggaacaaaatgtagaactctcagcttctactgcaccacgcctgcctagtcgatgttatgttcccgccttgatgattatggactgaacctctgaacttgtaagccagcctcaattaaatattgtctcttacaagagttgccttggtcatggtgtctgttcacagcaatagaaatctaagacaatgcttaaagtttgagcctttcattattgtttactcttccccagatactcctgggagactataaacatttgcttatggttttacatgccatatggtaaatatttgtcaacttcctgtgtaatgcctgggacttaaggttttacatgatcagctgtaaccctatcccgtgtacctcaggaaccaccctatgatctcatttaaacgctctataaaccttttaagatggaactttcatgtcaccaaaatggctgtgataaagacgcttactcatggctttcttgagctgtgcacacccacatcggggtgtttcttatctttaccttgaatgattccccagaactcttgatacaccctcacacctcctgcttaaacctatggttgttttgtcttccagaggggctggaacaaactctcaggggttaagagcacttgcttctcttgcaagagaatctgagctcagttctccacaagcacgcagtggctcacaacaacctgtaacttcaattacagaggatcccacactggcagcctctcaggcacaaggcatgcatgtgatgcagacataaacagggcggaaaccgcacagacagataaagtaaataaacctgtacaatatttctttccaataaactctaattcagccgtatactggatcatcccaaaattcttttctgtggcaaagccacttcaaatgtatatatttgaatcttaaataaaattgcttgtcctataaatggaaaacaaaaatcaaagcaaaatcaaaacaacaacaacaacaacaaccacctcagcatcagttgagaggtggttttccagagaaaagcagaaggatgctagaactgtctcagtattcccctggggctgctagggaagctgtggctgctctggaactgctagaagaccctgtccccttatcctgaagaggagatcctcaatccccctgcctcaactattttagcgttggatcacaggcctgcattgattatgaagaggcaacagccttgcccagagtagagactatagaaagccttattctttgcttagaagtctttacccaaatggtggtaggtgggggaatcctggagagccagacagtggtgccttgtagatgccctgctgactctgactctgaggacaggagcttgacttctgactttgcctctcaaattaaaggaggcttgataatctcttaagtcctggccaaaggacactgataaaatacctcgatttcattttattttcttgtttatttgtgtatgtgttagctatacaaacatgaacacaggccataagaacgttccacttatatttcctctccctctccctctccctctccctctccctctctcgcagatctttcaagacagggtttctctgtgtagccctggctgttttggaactcacagagatctgcagcctctgcctcctgagtgctgggattaaaggtgtacaccatcaccaccctggctttgcttattctctagagacagagtctctctctgcatctgtagctagactggcagccagcaagcctcagggaagctcctgtccctggcctcacaaatgctggtcttatggacatacaggatcacacctggactttttttttcttatagtgatgccaagtgactgggtctcatcctcccacattcagtacttgatggtccaagttggcctcaaactctcagtccttttgcttcaacttccttagtattgaataataggcccacattgaatcttgttaatggtttatatatgcttggcccagggggtggcactattagaaggtgtggccttgttagagtaggtgtgtcactgtgggtgtgggctttaagaccctcatcctagctgcctggaaaccagtattctgccagcagccttcagatgaagatgtagaactctcagctctgcctgtgtcatgcctgcctggacactgccatgctcttgccttgaggttaatggactgaacctctaaacctgtaagccagccccaattaaacattgtccttataagaattgccttggtcatggtgtctgttcacagcgatgaaaccctaactaggacaattcttcagagacagcagtcttgcccactgtagagactgcacacttagcatgacttagttaaagtaccttgagtttcacactctgcaagctgtgtaaggagagaagagttcactgtggctcacagcttgagggcacagcccatcatggtgggggcctggcccggcagctgctcacactgctcctgtgttcagcttcttctctattatcttattcagcccagaaaccctgcccatggaccgctgtcaactttcagggtgggccttcccacttcagttaactgaatcgagataatcactgataaacatgcccagagatttgcttccacgctgattctaagtcaccagtcaagatgagccatttaagcctacgaagcctatgtgaacctaagtccctttatctacctgctggaccctgtgcacccgagcttgcctttgcttttgctatgtgggagagggccagtgccctgcaggaatgctgtgctgtcttccctcagcccttttatctcagctgaggccctcactcccatctggaagtttggactctggcctggatcaattagaattccttcagctcttaactggcctatgaaaatagaaatttattggtttggaaaactggaaggtaagtccaaaggtgatcccaggcaaaggagtgtcccaaagcctggaagactgatgtcttctcatttcttagctctgatgagagcttgtgctggcctcctttctgaagcagcaatctcagtgaatggaacacttccattccccactggttctgcctgcagtcccagaactgaacctcgcggagctccctgcccactggagctccctgcccactgtggtccagtaaggagaacactccgattggctaaacctggtctcatactctctgcagacttgaggactgcagccaatcccacttgaacttttaaatgcagtctctgtgttagctcttcaaggccacgtcatggcacagtttctagaagaggaaggttgcatactgcataggtaaactcagtagaggaccacgcaagggttttttgtttgttttgttttgttttgttttcctccacaaatacaagacttactgactagtagtggcttaaaaacattaagactcttatctcatattgtaagctgtctcagttggcaggcacaccaaaagttactgagtccagagaagctctaatcccccatctcccaacatgtcaacttttgattcccaggtccctgaaagtgattgtcattctcaacacacatactcacagaacattgagaacaagtgtaaattggtcagtttttttgtttttgtttttgtttttgtttttgtttttggagacagggtttctctgtatagccctggctgtcctggaactcactctgtagaccaggctggcctcgaactcagaaatccacctacttctgcctcccaagtgctgggattaaaggtgtgcgccaccactgcctggcaactggtcagtttttgttgccgtgataaaacactcaagaacattagttaaaaggaggaaagatatactttggctgacagtctcagacgtttctatccatagctgcctttgggtctgtggtaggctgagtatcacagagggcaatgagtggtggaacaaacctgcttactacacagaagctgggatacagggagacagcgagaactctttctagggcattactgcagtggcccatttcttccaaccaggctccacctccaaacagtccattaagttttgaatttaccaatggatcagtccattgactaggccagagttctgatgatccaatatgcctatcagctgcaaccacgttttcaatacgtgggctgttgggcctctgtgatccagaccgtaacagtgcatctgagtgcctggccagggtgattaaagatcctttgtgtccctcgctctatattgatcattgaggaaaatgcttgccctggaagagcctctttaactgtcattgatggtacagagctagagctctatagctacaagagaagcttggatgtgcggatctctgttttgtttttgaggctgtatcacaaggctttgccaaaactggcaaaagaggaggggactaatagctgtgtggtatactgtcttagtttgcttcctactgctaggatgaaccccacaactgaaagcaatctgaggagggaagagttttacctcatctaggaattctcaggtcacagtccattactgagggaagtcagggcaggaactgaagctggcacgcgcttagtgcccaggcttgtgttcatctacctttctcatacctcccgagaacacctgtccaggggtactaccactcacagtggaatgggctcttccacatcaatcactaatcaataaaatagcccacagacttgcctacaggccagtaagagacattttcttgattgagcgtcccgcctcccagatgactctaattcatgtcaaactgatgaaaagctaatcagcaaatatattattttagtttcatataaaatatttattttacttttattaacttgtgtctgtatgtgggtatgcttgtgtgtgttcatacacatgcacatgagtgtatgaacctgaggaggtcagaagagggtgtcagatccctaggagctgaagttacaggcacctgacatgggtgctgggagctgaactcaggtcctcggcaggcgcagctcttcactgctcttcagtgcccatcattgatgagcttctctgtaggctttgctgagtgtggcaacaacacccccattccaaacatccccaactctcaatggttcatgctgtaaatttatttcttgtggaagctctgtgctgttattattcatgggcagatgtaactctgctccctgtatttctgtctttggagcagatacagcacactacctcctagcaaaggctacgaacagaagagcctcaggaaacacaggctcttaaggttgtgtttggtcaggcaggacccctacttagttggtaaaaacttagactaaagtaactacagttttgttatttcctaaggaattgtggatttgagaagcagcttagctactattttgttgctgtaaggagacaccacgaccaaggcaatttataagaggaagcatttaactgggggcttgtttacagattcagcgtgagagtccatgaccatcatggcagggatgacaacaggtgggcaggcacagctctggagtaggagccgagagcttacatctgaccacaagtaggagacagcaggagtgagagactgctcctgacatggaattttgaaacctttgagtccatcctcagtgacacatcccctccaacaaagccacaccctctaatccttcctaaacagttcaccagctgggaaccaaacattcaaagtatgagcctcttgggggccattctcattcaaaccatcacagaagggctcagctgaacctctgctccaaggggcattggctgcgtttgatgtgcagagaggctaccctggagagtctagagcagaggttttcaacgtgagtcaggacccctaggcattgtcaagagaacctttcacagaggtacctaacagcactgggagaccctaaccctaaacctaacctaagactctttgcttttagattcctggtggtgtcttgtggtctgtggggaccctctgatctgtgcataaaagtgtgtatgtgtgtgtgtgtgtgtgtgtgtgtgtgtgtgtgtgtgtgtgagagagagagagagagagaggtgggggagaggcggggcacatgagcacaacaagcatgtggaggtcagaagacagctcccctactttgtcagcaatattgttgttgttgctgagataaagcatcatgaccaaatgtaacttgtcgtggaaagggtttattcagcttgcatgtcctgatcatcactgagggaagtcaagccaagaatgcaagcagggcaggaacctggaggcaggagcagggcagaaacactacttaactggcttgctttgtgattcgctcagtttgtttttctataggacccaggaccacctgcccagcagtggcaccacccatagagtgggtgggactcacagcaatcactaatcaagaaaatgcccggaaggcttcctacagaccaatctgatggagaggttttctcaattgaggtaacttcttcccagatgacccaagcttgtgttttattgacagaaaaatcagccagcatgacaacttttgaatgttattccttatgagatacccttttttttttttttttttttttttttgagacagggtttctctgtatagccctggctgtcttggaactcactttatagaccaggctggcctagaactcagaaatccacctgcctctgcctcctgagtgctgggattaaaggcatgcaccaccacgcccggcttttttttttttttttttttttttaagtgagacaaggtctcttactgtcctgggactcaccatataggctaggtttgctggtcagggaactggctctttctgcacccccaacactgagattatcagagtgttgccaccatgcctggctttctggtagttaactcaggtcctcatgcttgtcaggcaagcactttactgattgagatatctcccggacccaactttataatcataaaaaggcaaaaaatgaaatagaaaggtagatatgtttcaatttaactgtagctttgccccagacctccattcccagccctcattactgtcaagtgttctgcattgggcagcgagcctctgacataataaataataaattaaagggaatgttaaagtaggtctttgacacttacaaattggtttgataaaatgagatcctgtggacttcccattaaaacagcaattggctcagtgtaaattgaagtagggccttgagcatgaaacctaagccatagcaggtgattacccccacggtctcctccctttgacagttctatttcacttaccctcaagcctggggaaaactgaaggcatgttctaactcactgctataaccttcactcaagtgttcccatccatcaaggtccctaaacccaacataaaaaaatgcactgatcctttccagtgaacgagtgggaagcgttggctttaaagatcgcctgacagggtctgtctagttcctgttccagcagattctcagccattcaactcagaagggatacaatatccctttttaggtcacttgtgagggactgccacagctttctcagcacacagaggctttgcagaaccccggaggcactgtggaccttcctcaggagcagaagcctgagttcacgtcacatcctctcctgaggagactccctggacccactcacatgacccactaacttagtgcaagttcatcttttggggcttgggtggcaacatatttcacaaagtttactttcgaatcaaaatgcagctgtctgcatatcgtgcttgcctgggggtgggggacgggagggaaaaggaggatgggagcctctggcgggaacgcagaggcaaactgtctgtacaacactgaagtctctttagtatcagtaattagtatcagtaattacaacaaagccaccaggcatttccagcatcttttaaaaaattcctccttagagagtctggccacctcttctcataccttcgtgagttgtcagatcaagatttgggatgcaaaatctgccctctcaacttcctgctgaacaccaccagagcggcaaaggatgagctatggaagaaggagctgtcctggaagaaggggctgtcacaggccctgagcccctgatcctccactccgagctgcctgctgtgtggtcttggtcatggagagagcctgacgctaacacaacatggctactatatcgcttactattcaggtcactgtgaccaagtacctgacagaattaacttaggggaggaaagattcattttggctcatggtttcagaaggtctcagtgtatcatggtgaggaagacactgtggtggctcctcctatcacgaaggatcaggaagcatagcccggaagtaggggctgcattagaagctccaaaggctcacatctagtgaccagcttctataggctaggtctgaccccattaagtcttcacagctccctaaaatagtgccaccagccggggagaaggtattcaagacaggagcctgagaggggaattttagatttaagctaatagttgtcaaggtctccaagttagaatctgaagcagggctcctggctttttctgccttcagaaggagagttcccttaggctcagtcctgtgccagatgccaggatggtggaggaattcatgtctttcccagaaccctctgctgcctggaaaccccctttgagtgagctgagtgaacaatgatggaagtacggagactgtgaaaggcactgctgaccgctacatcaggcagtgctacagtgcactgccacctcctgccacgcagtagttaacctgtgtttgttaactactttgcccatcgatgagattaaaatacctgcaaacccaacttatggaggaaagggattgttttatcttataggttacagtctataattgagggaggctgggacaggaattcaaagcagtaacctgaatagacccatagaggaatattgctttttgatttgatcttccagggtcactcagcttgctttcttatttagcccagggccatctacttaggagtgccaccacccacaataggctgggccatcctaattaattagcaatttagaaatgacttactgacatggccataggcaaacttgattgacataattaaaaaaattatgcgtgggtgttttgcctatatgcatgtctctacactacaagcacgcacagtgcccatggaagccagaggagggtttcacatcccttggtactggagttacagatggttgtaatgtgggcactggaaattggacttgggtcctctggaagagcagaagtactcataaccactgtgatattcttgcgcgcgctcgactggccaggaagaacgacgctgcaacaggatccttctgcac

SEQ ID NO: 502 - DNA, 1500 bp, Mus musculus
ctccaggctgaaacgaccagttgttttcagccttcccctctgacctgctactccgggcattgttttctgttctcccagagttgtaggtggcaggcgaaaaacgcctagattctggctgctctccaggaccgtgaccttcggctctggggccactgggcagccgcgccttttggacgggaggagagaggaagcagaggactcctggttcccctggctgctcgtctcctcctgtggctctgccatgggctcacgaagctctcatatcgcgctcattccagacgtggagcacattcgcagagagacaggcttctcgcaagccagcctgctccgcctctaccaccggttccaagccctggacagggatgaaaagggcttcctaagccgcctagacctccagcagatcggagcactggctgtgaatccactggttgcatttcagctctatgatctggatcgggatgggaagatctccaggaatgaaatgctacaggttctccgcctcatggttggggtccaggtgacggatgagcagctggagagcatcacagaccgtacagtgcaggaagctgatgaggacggggatggggctgtgtccttcctggagttcaccaagtccttagagaagatgaacatcgaacaaaaaatgagcatccggatcctgaagtgacccctgtgtctgactcacgtagacgtctgtgggcttgggatttacctacctgggtcccctggaggcaggatcccacaagccatattctactttgaaactttgcttagggctaggaaaggaagttggaagaatgtgtgctgaagtctcatttgctctcagatttgtgaatcactcagtgatttggttgcaagtggctgaaaggccaacccaaagtgacctgattaaaaaaaaaaaacgtgagaagagtgacacacgcctgtgactagacagcctggaagtagttgcctttagggacagctggatccaaggacaagcatggtgtcaccagaattgagttttgtcacctggggttctcagcttggctgcctccttgcattgggatcattttttgggggtacaaagggccgacagctatccagattaacatctgcttagcacactaacccagaggaagagttgtcttactccagaaatgccaaccaagcagcatcattgacccagctgggtcttttctctatctccaggggaatggaacatccaaaaaagctatgcctgtgtcatataataattccaaaaccttgaaataatgcctgaagtcttagcatagagtgagaggtggttgccttaaggaaaatgaagtaatgttatcagaaaaatgtgtgtgtgtgtgtgtgtgtgtttatgttggttttgttcgggcaacgtgaatgatgcatctctttgctacttggttgagcaaattaagggaatcttgaaatatggcctcttgaatgggttttctctgatccccttgatgaaagataatatgatggggttggtggctggtgggagga

SEQ ID NO: 503 - protein, 205 aa, Mus musculus
PATPGIVFCSPRVVGGRRKTPRFWLLSRTVTFGSGATGQPRLLDGRREEAEDSWFPWLLVSSCGSAMGSRSSHIALIPDVEHIRRETGFSQASLLRLYHRFQALDRDEKGFLSRLDLQQIGAVNPLVAFQLYDLDRDGKISRNEMLQVLRLMVGVQVTDEQLESITDRTVQEADEDGDGAVSFLEFTKSLEKMNIEQKMSIRILK

SEQ ID NO: 504 - DNA, 24318 bp, Homo sapiens
agacagcgacctgatggcattgtttgaacacctggatctcgctgtgcctgaggtacattcccctagaattccctttggcttgagcttatccatgctctcctttccttaatctaggttgaggttggtttctgcctctggaactcaaaagtttcctaagaacaactggccattgtgaaatggttgcacttctttagaaagccctcaggctgccctgtggagaatagacaggggaagagagagggcaaggggagggaagggaagaggagggataatgttaggaggtgtttgttgttgttgttgttgttgttgttgttgttgttgttgtttgagacagagtctcgccctgtagcccaggctggagtttagtggtgtaatttcagctcactgcaacctccgcctcccgggttcaagtgattctcttgcttcagcttcccgagtagctgagattacaggtgtgcaccaccatgcccagctaattttttgtatctttaatagagatggggtttcaccatgttggccaggctgatctcaaactcctgaccttgtgatccacctgcctcggcctcccaaagtgctgggattacaggtgtgagccaccgtgcccagccggccttggaggtgttcttaaacccagtttagatgtctaataggcacctcacctggaatgcatctgctgtggtctgaatgttcatgttccctcagcaaaactcatatgttgaagcctaatcccaaatgtgatgttatcaggaggtggagctttggggaggtaattaggttgtgaaggtggagtgctcatgaatgagactttcgcccttataaaaaagacccgagggagctgttggttgtttccactgttggctgttatgaataatggtcctgtaaacatccgtgtacaagtttttgcatgactataagtttttatttctttctatatacctaggagggaatggctgggtcagtcaggtcattcttgcactgttcctgtgacgactcctgctgtcaagctcccccaaaactgtcctggtttatgccttttgcaaacctaattctccagtcttcttcgtaaaaaaccagtttgttttagttcagggattcctttccttcccagatgggcaaaattctgaagatctagaagaacagtgacttggtactactggggtatgttcagtttttttgtgttgccatcctattaggccttgaggcactctggacagtacaccccactgggttctgatttataccagtcttgatgcaaaatttagctttcctggagagctctgaagagaaaacatgtcagtcttttactgagtacagccctacacagaatgcaactcttgatggaaccaaccccaccactgcccagtagcacccagcttggcattagtgagcagaagggagatggatgttttcagtcctcatttggaaaaccacatcatacacatgaccccagaaattaccatgattgtccacatttgagccataaactacaagttatggattttgtattgacttttattaccagactcgttttctttactgagctgaaaaaccacacacctgactctcctcccgtcactggccattttttctcaggcttctttggcagctccttctcctgttcccaactttttgatgttagaggatcatcagtactcaatcctaggacttctcttctctcttcactgacatcccaggtgatcttgtccagtcccatagttttaataccaactatacaatgataacccccacatgtatatagccttgtcaattcacaaagaagagatgacaattataaacatatgtgcaccaaacaacaaatcccccaaatctatgaagcaaatattggcagaattgaagggagaaagagacagctctacaataatggttggagacttcaatgccccactttcaaaattgaatagaacatctagacaaaataatcaataagtaaatagaggacttgagcaacactacaaacctactagacctaacagacatatataaaatacataaaacaggctatccaacaacagcagaacatacattcttctcaggtgcacatggaacattctccagaataatccatatgttaaaccacgaaataaatctcaatatatttaaaaatactgagatcatacaatgtatcttttctgcaatggaatgaaattagaaatcaataaaagaaggaaaagtataaaattcacaaatatgtagacattaaacagcatactcttaaacaaccagtggatcaaagaagaagtcataaggaaattagaaaatactttgagacaaatgaaaacaaaaacacaacatacaaactatatagctcttgctccaacttctctcttgaagctgatacacccatatacaataatctacttaatatctttattggaatgtgtaacaggcagctcaaggattttttttttaactctccccttgaaatgtgcttcttctgctctcttcaccgtcttagcaaatggcaacttccagttgtttaggacaaaaatcttggagtcatccttgatttctttctttcacagcctacattccatatatgaacaaatcttgcaggctgttctttcaaaataggatccatatttgaccctttctcaccattccactgctggcactgtggtccaatccaccatcatcttttaccttaattatcacaatagtctcccagctttcatcttgcccagtgaagtctacatacagcagccagtgtgattcttgtgatgctactaaaacagaaattggagccaggtaccatgactcaagccccaaatcccaacactttgaaagactggggcaggaggattaattgagaccaggaattcaagatcaacttgggcaacataacaagacccaatttctacaaaaaataaaaaaattagctgggtgtggtggtgtgcacctgtagtcctagctacccaggaggctgagacaggagcattgcttcagcccaggagtttgaggctgcaagtgagctgagaagctgccactgcactcctgcctgagtgatagagtgaaatcccatctcaaacacaataacaacagcaaaacagaaattgcattatcacatcctccaaggtaggtggatcacgaggtcaggagatcaagaccatcctggctaacatggtgaaaccccatctctactaaaaatacaaaaaattatcctggcatggtggcgggcacctgtaatcccaactacttgggaggctgaggcaggagaatggcatgaaccaggcaggtggagcttgcagtgagctgagatggcgccactgcactccagcctgggcgacagagcgagactccgtctaaaaaaaaaaacccttccactatgttctaccacacttttgtgactcatgcttgcttgttttgaacatatctaagctagtaatagtccattgtttcagtttgtattttagactttgtatggttaagtgtctttttatccttattgaccatgcctcttttacatcttatcccaattatttttcctattggattgtcttttatcttttacatatacatatttttatgtatgtacatacgtatatacatatttttatgtatgtacatacgtatatacatatgtgtgtatgtatatatatatgtagccatacggaggtttaagtttcatgtagttcaaatttgtcaaacttttaattaattaattaattaattgagacagggtctcactctattgctcaggctggagtgcagtggtgtgatcacagctcactgcagcctcgaactctttggttcaagcgatcctcctgcctcatccttccaagtagctgaaactacaggcaagtgccagcatcctcggctaatttttgtattttttgtagagacagggtctcgccatgttgcccaggctggtctggaactcctgggctcaagtgatccactctccttggcctcccagagtactgggattacaggtgtgacccactgtgcctggccatgtcaatcttttctttatgatttctttgttttgtttcatatttagaagaccttcttctgtttagtattataagaacagctacccaagattttttctagtattacatggtttcattttgcattgaaatctctattcgatctggaatttattatattttggtataaaaaggtaaagtacagccttatttttttctcccaaaagacagagagaggacccaaatgacatttttgaatgtcactaatttgaaatgttacttttatcaaatgccaaatttccatatatatttgggtatatttctgactttctccccttctttccttcctccctcccttcctcccttccttccttccttccctccctccctccatccttccttccttccctccctccctctctctttttctctctttctttctttctctttctttctttctttctttctttctttctttctttctttctttctttctttctttcccttccttccttccttccttccttccttccttccttccttccttccttccttccttccttccttctttcctttctttcacacgggaaagggtctagctctgtcacccaggctggagtgcagtgctgcgatctcggctcactgcaacttccacctccggggctcaagaattctcccgcctcagcctcctgagtagctgggactacaggctgtgcaccatcatgcccagctaatttttgtattttttgtagagatagagttttgccatgttgcctgggctggtcttgaactcctgggctcaagtgatccacctgcctcagcctcccaaagtgccgcgattacaggtgtgagccactacacaaggcctcttgtctctgtgtgtgtgtgtgtgttttttaattgagatggaatctcactctgtttcccaggctggggtgcagtggtgcgatctcggctcactgcaacctccgcctcctgggttcaagcaattctcctgcctcagcttcctgagtagctgggattacacacacccacaaccacacctggctagttgttatatttttagtacagacggggtttcaccatgttggccaggctggtcttgaactcctgacctcatgatccacctgcatcggcctcccaaagttctggattaccacgcctggccctttattcctgtttcttacctctctattcctggtagaggaatttgtatttccctgatgactaatgatgttgatgtcacccaccctcattacttttcgtcccagagctttcctggctattctgtttttaatttttatttttttgtttacttttttctttcaaattttttttttgttttatagtttgtttttaagaagacaaaaaaagatccctctgtaggttcagctacagaaatcttgttacaacttttatttcctctggagagtcaagtttgactgtcttctctgtgctgttttcttttaaaaaagttttaatgagatataattcacataccacacaatttgcccatttaaagcatgcaatgcaatagattttattacattcacagatatgtgcaaccaaactatcaccagagtcgattgtagaacattttcatcacctcaacaagaaaccctgggaccaggcgcagtggctcacacctgtaatcccagcactttgggaagcagaggcgggtggatcgcttgagcccaggacagcctggggaacatagtgagatcccatctctacaagaaaacaaacaacaacaacaacaaaaaattagccagttgagatggcatgtgcctatagtcctagctactaaggaggctgaggtgggaggatcatcttagcccaggaagttgaggctgtggtgagccatgatcactccactgcactgcatcctgggtgataggagaccctgtcttaagaaaaaaaagaaaaaataagaaaccctgtacactttagctattatccctgactcccacctacctcccttagccctcggcaatcactaacctactttttgtctctacgggtttgcctattcttaacatttcatgtaagtgcaatcatataatacgtggtcttttgtgactggtttattttacttagcatagagttttcaaggttcatccattttgtggcatatataatacttcattactttttatggccaaatgatattccgttgtatcaatataccatgttttacttatccattcatcagtcaaacatttggcttatttccaatttttggctgttatgaatagtgtcgctatgaatattcactacaggtttttgtttgagctcctattttctttctttctttctttctttctttctttctttctttctttctttctttctttctttctttctttcttttttttttttgagccggagtctcgttctgttgcccaggttggagtgcagtggtgcaatctcggctcactgcaacctctgcctcccaggttcaagtggttctcctgcttcaacctcccaagtagctgggattacagatgcgtgccaccatgcttggctaatttttttgtatttttagtagagatggggtttcattatgttggccaggctggtcttgaactcctgacctcaagtgatctgcccacctctacctcccagagggctgggattacaggtgtgagccactgtgcctggcctgagcccctattttcaattcttttgggtgtatacctaggagcagaattgctgggtcacatggtaattttgtttagtgtattgagaaactttcaaactgttttccacagtaactgaaccattttacttttccatcagcaatgaatgaggcttccaactttttcatagcctcactaagacttgtttttgtttgttttaattccagccatcttagtgggtatgaagtgatatctcattgtggttggtttgtatttccctgatgacgaatgatgtggggaatcttttcatgtacttattggctaaacatatatgtttttttggagaaatgtctattcaagtcctttgcccgtttaaaaagttgggtcatttatctttttattattgagtgctaattgttctgtattttcctgactattcctggatgttcattcttctagttgaaccttcaccaagaatgactagcggccaggcgtggtggctcatgcctgtaatcccatcactttgggaggccgaagtgggcagatcacttgaggtcaggagttcgagaccagcctggccaacatggtgaaaccccatctctactaaaaatacaaaaattagccaggtgtggtggtgcatgcctgtaatcccagctactagggaggctgaggcaggagaattgcttaagcccaggaggcagaggttgcagtgatctgagatggcgccactgcactccagcctgggcaacagagtaagactctgtctcaaaaaattaaataagaaaaaaaaaaaaagaatgactagcaacttttacatagctgaaaagcaaaaaccaaatattcctcctgactctagtctaacagattctgcagataaaattttccccaaagcatcttcccgcttaaatgacctgaaaaaactgtgaagttgatttaagtctcacttgtgtacatgaaacagaaatgagttctagcatagcctgctctctctctctttctttttttttctttttgagatggagtcttgctctgttacccaggctggagtgcagtggtgtgatcttggctcactgccacacctgcctcccaggttcaagtgattctcctgcctcagcctcccaaatagttgggattacaggcgcctgccaccacacccagctaattttttgtatttttagtagagacggggtttcactgtgttagccaggatagtctcaatctcctgacctcatggtctgcccgcctcagtctcccaaagggctggcattataggtgtgagccactgtgcctggtccagccctctcttaaaagcttgtgtatgatgtgtgcatgggagttcctaattactctccggcctaatttactttggtgtagcactgactccaatattaaggctggagaagccctttccaagatcagcatcccaagctggcctgcggtgcttatcacagcttcttagggctctcatctcctcctgggttcagaactgaacccaaactacatgcacagcctgactcacagctgtgggttgcagtgattgctgggcttcattagggaggagtgtggtttcccgcatgcttagtctttggggggagtctgaaagagaatcaagcattccttatgccagttgcttaatccttgggggtatctgaaagaagcaagcacttcttagatcaatattttcaagacttatctgatgcaggcctctgcctggggctggaggatagactgtttcttcagcttctctctctccagggtggatatgaacttgagcccttgcaatgaactgcttgcatgttttcccccctgggaaatttgtgtatgtatgtgcaattatgatgggggaaacggtttaaagatactttcaaaagtggacacttctagtgtttgtcccttgacaaatgagtttctcgacctgtttttttttcattatcaacgcctcccctagtctttttaatttccccaccctcacccctaccccatgaaattttattttctttctttttttttttttgagaccaagtttcgatctttttgcccaagatggcgtgcaatggcgcgatctaggctcacctcaatctccacctcccgggttcaagcgattctcctgcctcagcctcccgagtagctggaattacaggcatgcaccaccacgcccagctaattttgtatttttagtagagactgggtttctccatgttggtcagtctggtctcaaactcctgacctcaggtgatccgcccgtctcgacctcccaaagtgctgggattacaggcataagccaccgcgcccggcctcttttcttttcaagacagggtctcactctgtcacccaggctggagtgtaatggcgtgatcatggctccctgcagcctcaacctcctgggctcaagtgatcctcctgtctcagactcccaagtagctgagactacaggcatgtgccacgacacctggttaattttttttttttgtattcttttgtagagatggggtctcactatgttgcctaggctggtcttgagctcctgggctcaagcaatcctcctgcctctacctcccaaagtgctgggattacaggcatgagcctccacgtctgccctgaaatttcaatatcacagctatactgtatatctatttatgtgctgtatgtatgctgtgctttgtacataaaaaatatgttttattttttgccccgttggggtgagatagagaccgcactgagaatgcacgctttacataattagttcacaacttgcccccggcagcctccaccacgtaaaattagaagaaagcagcccagcagggcctacaaggaatgtgtgaacggatgcacgtaaagtgcttagcaaagcgtggtaaacaagagcccttgttgtcattcttgctttaagcctagtcccagtgatgtctgtaaccctctcttgggccaaggagtcccatggctctggagggctgttcagaggactaagtcattcccagtctggagctctacgggatcagtaggtacctaagggagtgaattgggcttggagggactgtggccagaagacagctctgggcctggtggtgatagaacttctgatttctcaggaaaagccaagaatgtggattttgggttaaatctcctgaattttaagcattggctcaattaaacaacaataaggcaatgtgaaccgaacaaaagggatgaaaccaagatttactgactttcccagagtcacgggcacggctgggattccaacaaggactcccaaaccagtgctctttccacttaacctaacgcacacccttcatctcgccgcccctccccacttccccgtctttgggagttcttcgatgcctcttcccccctccccccaggattccctccccataggccacccgccttccagcagggcgtggtctctacagaggaggtcaggtctcccaggcttcctcagcgtcgacgccggggagcgccctggggttgggagcgcccggggcccgcgaaggaggaggtggctcaggtgtcagggcgcaccgtgggaaccggccccgggggaggcgtggaaacgcggggcctgggactcgaccagcctctcccgtgcggatcgcaaaatctcggagctgaaacagcccgttgttcgcagcctccctctgacccgccaccctgcacattgttttccattcgcccgggtcgcgggtgggaggagaggcacgccggggttctggagcttggccgcgcgccaggcttgtggccttcgtccccctggggccactggggcggccacgcctctccggcgggaggagagaacgcgtgggtccgggtggctgctccggcccttccgcctccagctcggccatggggtcgcgcagctcccacgccgcggtcattcccgacggggacagtattcggcgagagaccggctgtgagtgcgcccgcgtcggcggctgcggaggggacggggcgaacccaggcgtctggggctagggaaggggttgggttgaaggatggacgaacttacaagtctggggtccggggctccccggagctggaagaccaaggcccctgtgcctgggatcgctgggttaggggcgggttaacctaggggtcccagcctccaagtctggggaggatccgggttcacggggtcggagtccagaggaatccaggcacccaggtgtcctccagcccggctcgaagctgaaggcagagctgacggcggttggaagggatggctttggttctttggttttcgggaggttgcgagccgcccgggtcttgaacctggatcttcgcggggtcgtgtcactctccctccgccccggccagctcaacccctgattccccgggatgatcgccccttccagccagcccccgctgttctggcccatcttcctggcctgttggggcgggtttctggagctggccctgcagagtcacacacccccaccccactctccttcccgcagtctcccaagccagcctgctccgcctgcaccaccggttccgggcactggacaggaataagaagggctacctgaggtgagggggagccggcctcataacttctggcctctgtctctctgactccatgtccctctttgaccctccgtctggcatctctgccttaccctctttgaaatttggctttgcagccgcatggatctccagcagataggggcgctcgccgtgaaccccctgggagaccgaattatagaaagcttcttccccgatgggtgaggcttgctgggcgtggggaggtgaaggcgggaaaaccggtgtgtgagtgggtgggaggggaggttagagacggaggcaaagtgatggccaaggtgaccaccacctctttccattctgtcccgtctccccaggagccagcgagtggatttcccaggctttgtcagggtcttggctcattttcgccctgtagaagatgaggacacagaaacccaagaccccaagaaacctgaacctctcaacagcagaaggaacaaacttcactgtgagtttgtgaggacctgcacaagtgagaatgcagatgtacccacaccagggacaggctccagggatctcccactcccttcctgagggcattgacaacctcccccctcctccaaggtggggggaaggaaggtggctgctggaagagagccagggaagacctaccttcctttccccctcccaccctctccccagatgcatttcagctctatgacctggatcgcgatgggaagatctccaggcatgagatgctgcaggttggcagaaagcgagagcaagagatgtgatgtgtgaaggatgggatggttaaatgcaatggtgtgagagatggggtgggatgattggggaactggggcgcagataattggggtattggttgggaaatgggaatgggtgcagttagagtgtgggtttgttgggagtcggagtggggagcagttgactatgaggttgggaatagatcagtgattctcaactgggggtgattttgctccctgagtgaatatctggcaatatctggagatgctttttgttgtcacaatgggggagagagtgtgctactggcatctagtgggtagaggtcaggaatgtggctatatatcatgcaatacccaggagagcctcttccaacaaggagttacctggctccaaatgtcaacagtgccaagattgagaaactctggaacagatgtgatggaatgaggatggaattagaaacccttagtggctaaggtggagaatggtgtggaggatggatggaggttgggtgataaagttgggtaatgagtttgagcatattttgagggtagtgcaggatggtgagggagagataggagattggttgttgaagcagtagggaaaattattggggggatatggtgaaaaatggatgaaggatggattataaaattagcaataacttttgggatgaggtgggcaaggtttaggagatggggagttgcagccttcgtgccccctccttatggctgcctcttcactcatctctcaggttctccgtctgatggttggggtacaggtgacagaagagcagctggagaacatcgctgaccgcacggtgcaggaggctgatgaagatggggatggggctgtgtccttcgtggagttcaccaaggtcagagtgcccttggggattggggagttgagatcaggagttctggggcagacagacttgggaaacgttcaacggaggagggcggaaagataggggttgcctgggaatgatggggtctctggaatgggtagaaccctgggggaggaggttgggagcagggagagctgagagtcaagcctcttgcctgccatttgtttttccctcagtccttagagaagatggacgttgagcaaaaaatgagcatccggatcctgaagtgactccgtttgtgccttgggcttgctcctgcaaccagtatctccttggaattcatccaaagcccccatggacgcatggacgcagggcgacaataaactgtattttcgtttctaactctatttagggccaagagaagaaagctggaaggatgtgtactaaagtctagctcagcagtccccaacctttttggcatcagggacagtttttccacggatgggtgacaggggatggttttgggatgattcaagtgcattacatttattgtgcactttatttctattatgattacattgtaatatataatgaaataattatacaactcaccataatgtagaatcagcaggagccctgagcttgttttcctgcaattagacggtcccatatgggagtgatgggagacagtgacagatcatcaggcattagattctcataaggagtgcacaatctagatcctttggtgtgcagttcacagtaggatttgggctcctatgataatctaatgccactgctgatctgacaggaggcagagctcaggcggtaatgcaagcaatggggagtggctgtaaatatagatgaagcttcagctcgcctgccgctcaccttgtgctgtgcagcccggttcctaacagaccacagaccccacaccaggtctatctcatttggtctcagagctgtgaatcagccagcaatattttagttgcaaatcactgaaaacccaactcaaagtgacttaagtcagaaagaaattttatgaattcaggtaattaaaaagtccagaagtatctgcctttaggcacagctggatccaagggcacaaatgatgtcatcaggctccagttattctccatctcccagctcagctttttctgtctgtaagcctgattttcaggaaggctctttcctagtgatggagatgaccaccatcagctccaggcttctatcctgctaacccagtaacccagtgggaagagatttacttattccaataattccaagtggagagtgtcattgacccgtttggggtctcatctctacttctaggggaatgaaacactctgagtggccaggcctgtgtcatgtgctaattcctagagccagggaaataaggtctgaggattcaggatggggtgaaaggtggttgcttaaaggaaaatgaaatacaattagcagaataaggggaaacgagtggtctgctctgctcgggcaaaacaagagatgcccattactgtgagggacccttgaagtctggactcttaaatgggtttttgctgatttcctgggtgcatgctaggatgatggggcttgatgcagtagggaagagacgatgtaaaaataataaacaatatataccttcctagagtgtgaatgcattcgaagattctaagagtaagcttgttttcatggtaagatgttcaaacattgatataagatggaatggagcaggaagtcccataaaactatgagactctatgtctgcagcagagctctctggttgcacctgtgggagacactgtaattgccctgctgtttttctccctcccagagctggtctttggttgtcttgtatcatcaacacatgagaaccagttgtgctcataacatctcaactctgctttcaatgatatgttagcagcttgaaactggctatagcaggaatatttacaccacagacattggtaactgcaacaggttaaggctttttcctcctggaaagccagttgttaaacatttatctgcacactacctgctagacatttcccattactttgcatgccaatggtttctttccttttttctcccttctttctttctttctttctttctttctttctttctttctttttctttctttcttttcttatcggttaatatcagttcaactgtcttaaacagaaaggaaaattaatcagctcacataacaaaaacttccaaggtagcacctcttcagggttagtaaattcagtggttcaatgtcatcatagagaatccttcccatcttctgccatcctcaggctagtacccctcatagtcccaagatagcagagttctaggggtcgccaagatagactgcaaaaattgctgcactacattttatcccctcccataaagaaatatggtctatttctttcctttttttttttttttttttttgagacagggtctagctttgtcacccaggctggagtgcagtggcagtcttggctcactgcaacctctgcctctcgggctcaagcaatgctcccacctcagcctcttgagtagcttggactacaggcacatgccaccatgcctagctaattttttttttaaaaagaggtggggtttcaccatgttgcccaggctagtcttgaactcctagactcaagtgattcacccacctcggcctcccaaagtgctgggattataggcatgggccactgcacccagccttacatgctagtggcttctttttgcaagcactgtgatgccttgctccagggctttgcacatattcagcctgtataaagggcagggtggaagtgccaggatttaatgacattaggagtagctctcaactagtgacagatggaaattggttggataaatacccattacttcatcattcaggtggcacaatttagatacatgttttcttaattttcatagcaatttccagcagatttgagcccccattgctcacagggttaattcatttgcttgttaaatcaccctgtcctggccgggggcagtggctcaggcctgtaatcccagcactttgggaagtcaaggtgggcagatcacctgaggtcaggagttcgagaccagcttggccaacatggtgaaaccctgtctctactaaaaatacaaaaattactcaggcgtggtcacatgcacctgtaatcccagctacttgggaggctggggcaggagaattgcttggacctgggaggcagaggttgcagtgagccgagattgtgccactgcacttcagcctaggcaacagagtaagactgtctcaaaaaacacaaccccaaaacaacaaacaacaacaacaacaacaacaacaaaaaacccaccctgtcctggcttccttcccttcctgtatcacgggcgtacttccctattagtgcttcccggatcacctcacaaataaacttactgtcaaacctcagggtgcttctggcaaaacccaacctaagagacactagaccttccagaacataagctcacactcaaccatggttgtgagtactcagtgggacattttgaggaagcattgcacagctgctggcactttctgattttagaagtttgaggtcatgtaaacacgacacactttggggccccaggaacctggaattgtccggggttaaccacaatgtgaaatgtggattaaccacatttcaacttttaacatttattattattattatttgagatggggtcttgctttacagcccaggttggagtgccgtggtgggttctcagctcactgcaacctccacctcctgggttcaagcgattctcctgcatcagcctcctgagtagtggggactacaggtgtgcgccaccatgcctggctatttttttttttttttttttgagatggattcttgctctgtcgccaaggctggagtgcagtggtgtgatcttggctcactgcaacctccacctcctgggttcaagcaattatcctgcatcagcctcccgagtagctgggactaaaggtgtgcaccaccatgcctggctaatttttgttcttttgtttttttggagttggagtctcgctctgtttccaaggctggagtgcagtggtgtgatctcggctcactgcaatctcagcctcctgggttcaaatgattctcctgcctcagcctcctgagtagctgggactacaggcgtgtgccaccatgcccggctaatttttgtatttttagtagagacggggtttcgccatgttggccaggctgctcttgaactcctgacctcaagtgatccgcccgcctcggcctcccaaagtgctgggattacaggcatgagccaccacacctggtctgaacccccttttttggcttcccaaagtactgggattataggcaagagacagtgtgcccaacccagatatatatatttttaaataagtgattctgataccagaagatgaaggaaaaaacttttaaaaacattgacctaaagcttccggccaggctcctagtgactgctatctataagaaggtctccaacagccataaggcactgagcatagcaccgggcccacaggctctaaagaaaggtctccccatccattcatgcccacaccttctctaggaactcagtaccaatcactagtgctcctcatctaataagggttactagagggcctgagggatccccaggattccactcgctgctctggttgttgggggcacaaaccactctcagcacgaaagtccccagatcccacccaaacctcaggaggggaggcttttgtcatgcaggtgaggggctgcagtctggctgctgggcagaaactgctgaacgccaccctccggatgtcaagtctggcagatgcctgtggatttgttctagaggggtcctgatgagaagcccctctcctgtgagcagcagttgacaatgtttagcgatttgtttaccatcgtcattattgttgctgtacagtatctatgtcctgtactgttactcattgtttgtctataaacacactcatttaaaatttatacatttgagtttgtaaaggaaattgtatttactcctataaattttattttctttttaaaatatattttctgcatccaatcatccattatcactcctataaaataaaagcagcatcaatggctataaataaaataactacacaaatacagtacatgcaaagaaacaaaaaatacacatataagggaatatcaacacaaagaaatgatatatgtttgaggtgaagaatatgctaattaccctcatttgagaattacacattgtatgcatgtatcaaaatatcacattgagctgggcgcagtggctcatgcctctaatcccagcactttgggaggctgaggtgggcagatcacctgaggtcaggagtttgagaccagcctggccaacatggtgaaaccctgtctctactaaaaatacaaaaattagccaggcatggtggtgggcacctgtaatcctagctacttgggcggctgaggcaggagaatcacttgaacccaggaagtggaggctgcactgaggtgagattgcaccactgcactccagcctgggaaacactcaaacaaaaacaaaaacaaaaacaaaatatcaactgtattgcataaataagtatgattattatatgtcaatcaaaaataatactttctttacaggggggagattaacaagtgttaaagagttttaaaagataaacctgcctcaaacagagatttctctttggtgatctgaagaatgcaaaaaagaattgagaagggtacaattttttttttctttttttgagaccagatcttgccctgtcaccaagcctggagtgcagtggtgcaattttggcacactgcagcctctacttcctgtgctcaagtgatcctctcacctcagcctcctgaatagttgggatcacaggtacatgccactacacctcgttaattttgctattttttgtagagatggggtcttgctatattgcctaggctggaattacaagtgtgagctaccgcacctggttaggaataaccttttcactgtgtgattcaatgttattgagctgtgttgttactacccaaaatcatcttgtgtatgtgagtggtgtgtttcccacaccttgggaacctctggctggagcaatctatgaggaaataaacttgggttgagtcttcccttcctgtcccttcagggagcatctggaggcagccatcagtgggctgaacatcgtgatgctcaggttggccactggtcaggttgggtttggcagaggttggccatcgtagcggaattcacttatcaggccaggtccagggacaagtaacaggacattatgacagatgcttcgtggagctggaaatattaaaagcaacagccctctgctgacattcgtctccagaacctggtaagacttgtaagtttggagacagggcccatgaacttgcccacttgctgggctaagatggcagagtccccaagggagaaactggaggtggctctagtcctggtgcttgcgatcctcatttgagagggagggtgcttcccagccaggagtgggaagggcactggagtggtcccagcttgttccactgtggctgctgggaaaggccttggctatcctggaattttctagaataactcatctatgtatctcaaagaggagacgggagttccagaagaagcacctctccttgccaaggagacaaaacttgagagggtatgtagggagccctcggaagagaagcaagtacaatcatgcatcacttagcgactgggaaatgaaatgcgttgttggtgatttcgtcattgtatgaacatcataaagcgtacttacacaaacctagatggtgtagcctactacacgcctaggcgatacggtgtagctgattgctctcaggcgaggagaaacctgcacggcatgttactgcattaaatactgtaggcaactgcaacataatggtaagtatttatgtatctaaagatagctaaacataggaatgttacagtaaaactgtggtattacagtcctgtgggaccatcgtcatatatgtggtccatcattgaccaaaacgtcatgacgcagcgcatggctgtagaaggacgtaggtagtgatgttgggtagacctggttatgctgccattgccccttgctaactgataaggaaaatagttaggagttctgaccttgtcctcagccctacctaagcaacaccaataaaactctttttttgtgagtgatggagtctcactctgttgcccaggctggagtgcagtggcgggatctcagctcactgaaacctctgcttcccgggtttaagtgattctcctgcctcagccaaccgagtagctgggattacaggtgcccactatgacgccgggctaatttttgtatttttagtagagatggggttttgccatgttggctaggctggtcttgaactcctgacctcaggtgatccacctgccttggccttctaaagtgctgggattacaggcgtgagccaccacgcctggctccaataaaactcttaatgtttaagaggcaacatacagacttgattcctggtagagccctaccctgagaatcagtgtggtttagtaaaaccacactggcgatacagtatagctgagtcttgttaggcctgggtttgaatctggacccttataatgagctgccgtacaaccttgggtaagtgattttaacccttggggctttagcttctgtcatctgtgacagagagagatactagcagctgtcctccagagctgcatcttatcctttctctctccccctctccctcaaacctacttattttagctgaggcccttggcctcatttgtaagcctggactctggcctgcaccagctgggattctttaattgttaactggctaataaaataatagaaatttattggttcatataactgaaaaaaaagtccaaaggtacaccaggcaaaggtgagtcccaaaggctcaatgatattaccagaaactagtctttcatttcttaactctgctgtcctctgtgttggtttcattcattcattcattcttttttttgagacaggtctcattctgttgcccaggctggagggcagtggtgtgatgttggctcactgcaacctctgcctcccgggttcaagggaacctcctgcctcagtctcccaagtagctgggattacaggcatgcgccaccacactgggctaatttttgtatttttagtagggacagggtttcaccatgttggccaggctgatcttcaactcctgacctcaagtgatccacccacctcagcctcctaaagttctgggattaccagcgtgagccactgagcccagccaatgtgttggtttcattcttaagcagtaaaataaaataccaataaagagagcctctctctcttttttaaaaacttctattttaagttcaggggtacaagtgcaggtttgttaaacaggtaaacttgtataatgggaggtggctacacagattatttagtcacccaggtattgagcctagtacccattagttatttttcctgatcctccttctccttccacccaccaccctccaaaagaccccagtatgtgttgttcccctctgggtgtccatgtgttctcatcatttagctcccacttataagtgaaaacatgtggtatttggttttctgtttctgtgttagtttgctaaggataatgagtctctctttcccaacagttctgtcaaaagtcccagaacaaaacctcattggtccatccattgtagccaggtaaatgcaacactctggttagccagacctgctcacatgcttgccccagtactatggactgaagtcaatcccacttgaaccaaatgcaatgtgtatgtgtgtgtgtgtgtgtgtgtgtgtgtgtgattccctaaaggaatatcagaatgttgttatgggaagaaggaggctgcatgttggacaggcaaaatccacagataactatatactagttagtttgcttttggctacaaataacagaattgccagctaacagtggcttaaataattaaaacaattatctcacattataagatgtctctggtggtaggcagtcttagagttattgaatgactcatcaatataattgagactccaagatgttttatccttctattcctcagtatgttggcttttaatgctcaggtgtgttgactcatggttacagaatggctgccatagctctagccatcacatcctcacaggaacagtgtctagaaaaggcttctggagagagtgtcctaagaaacaggaagtgtaagaccccagtgtcttaaagcctgagaaagtggcacaatgtcacttctgttataatgtattgagacaaaacaggtggctcatgcctgtaatcccagcactttgggaggctgaggtcaggagttcgagaccagcctggccaacatagggaaaccctgtctctactaaaaatacaaaaattagccgggtatggtggcaggtgcctgtaatcccagctacacgggaggccgaggcaggagaatcacttgaacgtgggaggtggaggttgcagtgagctgagactgggccactgcactgcagcctgggtgacaaagtgagactttgtcttgaaagaaaaaaaaatgaattgagacaaaacagtcctagagcacacagaagaggaaatatagactccatctctggatggcaggagtactgatgaatttatggtcatctttaatctgacattgtggttacaggtggggatgcataattttcttgcagggaaggaaagtagacattaaaaaaaatgaataataaaatgggccttatcttaccggttaacatctatcatttatcacgaaactaaagtaaataaaatggttggtttgggaagcctgtaaagtttaggcaactctatgtaaactgctttgtgaatggatttttctcatgcttattaatgcaaagcactaaataggtagatgtaaaagagctttgtgtatataaataatgtaaagtatctagcaaactattacagtattcaaaaaaatataataaaatacactttgggaggtcgagatgggaggatcgcttgaggctaggcatttgagaccagctgggcaacatagtgagatcatgtctctaaaaagtaaaacattagctggcagtgcacacctgtagtcctagctacttaggagactgaggcaggaggatcacttgagcccaaggaggtccaggctgctatgagctgtgatcattccttgcattccagcctgggcaacagaataagaatccatctctaggctgggcgtggtggctcacacctgtaatcccagcactttgggaggccgaggtgggtggatcacgaggtcaggagatcgagaccatcctggctaacacagtgaaaccccatctctactacaaatacaaaaaattagccgggggtggtgatgggcgcctgtggtcccagctaatcgggaggctgaggcaggagaatggtgtgaaactgggaggcggagcttgcagtgagccgagatagcgccactgcactccagcctgggtgacagagcaagactccatctcaaaaaaaaaaaaaaaaagaaaagaaaaggagtataatagcactttaggaggctgagtgggaggatcacatgagctcaggagttcaagactagactgggcaacataatgagaccctgtctctacaaaaaatacaaaaattagccgagtgtggtggtgtacacctatagtcccagatacttaggaggctgaggcagaagaattgcttgagcccagggggttgaggctgcagtggagtgagctgtaatcacatcactgcactccagcctgggtgacagagacagatcttgtctcttaaaaaaaaaaagaaagaaaaaaagtgtgattattaatgtattaatataatcctgagatgcggaagctttcctaagaagaatcataaagtaaaatattaatagtgttgactacataaaaatttaaaaaattaaaggtaaaagacaaactggagaattatttgcatcatgcatatcagacaacaggttgcaatcttttacatataagtagctctttcaattggaagaatatgaccatcctatatccaacaatatgaacaagaaggtttttttctttttttttttttagaaatataaatatctaggctgggtgtggtggctcaagcctgtaatcccagcactttgggagaccaaggcaggtggatcacctgaggtcaggagttcaagaccagcctggccaacatggaaaaaccctgtctctactgaaaaatacaaaaattagctgggcatggtgatgggcacctgtaatcccagctacttgggaagctgaggcaggagaattgcttgaacccaggagacagaggttgcagtgagccgagatcgtgccactgcactccagcctggacaacagagcgagactctatgtcaaaaaaaaaaaaaaagaaagaaagaaatataaatgtctaaatgcatatgaaaacattcaacctcaatgttgattaaaatttgattaaaatcacaactcttctgaggcccagtctagttttatatatcaaaagccctaaaaatggggagattatttgtcccagatcctcatttctaggcatgtatcctaagcaaataattaaggatgtgcaaaaagata

SEQ ID NO: 505 - DNA, 2374 bp, Homo sapiens
ggtcaggtctcccaggcttcctcagcgtcgacgccggggagcgccctggggttgggagcgcccggggcccgcgaaggaggaggtggctcaggtgtcagggcgcaccgtgggaaccggccccgggggaggcgtggaaacgcggggcctgggactcgaccagcctctcccgtgcggatcgcaaaatctcggagctgaaacagcccgttgttcgcagcctccctctgacccgccaccctgcacattgttttccattcgcccgggtcgcgggtgggaggagaggcacgccggggttctggagcttggccgcgcgccaggcttgtggccttcgtccccctggggccactggggcggccacgcctctccggcgggaggagagaacgcgtgggtccgggtggctgctccggcccttccgcctccagctcggccatggggtcgcgcagctcccacgccgcggtcattcccgacggggacagtattcggcgagagaccggcttctcccaagccagcctgctccgcctgcaccaccggttccgggcactggacaggaataagaagggctacctgagccgcatggatctccagcagataggggcgctcgccgtgaaccccctgggagaccgaattatagaaagcttcttccccgatgggagccagcgagtggatttcccaggctttgtcagggtcttggctcattttcgccctgtagaagatgaggacacagaaacccaagaccccaagaaacctgaacctctcaacagcagaaggaacaaacttcactatgcatttcagctctatgacctggatcgcgatgggaagatctccaggcatgagatgctgcaggttctccgtctgatggttggggtacaggtgacagaagagcagctggagaacatcgctgaccgcacggtgcaggaggctgatgaagatggggatggggctgtgtccttcgtggagttcaccaagtccttagagaagatggacgttgagcaaaaaatgagcatccggatcctgaagtgactccgtttgtgccttgggcttgctcctgcaaccagtatctccttggaattcatccaaagcccccatggacgcatggacgcagggcgacaataaactgtattttcgtttctaactctatttagggccaagagaagaaagctggaaggatgtgtactaaagtctagctcagcagtccccaacctttttggcatcagggacagtttttccacggatgggtgacaggggatggttttgggatgattcaagtgcattacatttattgtgcactttatttctattatgattacattgtaatatataatgaaataattatacaactcaccataatgtagaatcagcaggagccctgagcttgttttcctgcaattagacggtcccatatgggagtgatgggagacagtgacagatcatcaggcattagattctcataaggagtgcacaatctagatcctttggtgtgcagttcacagtaggatttgggctcctatgataatctaatgccactgctgatctgacaggaggcagagctcaggcggtaatgcaagcaatggggagtggctgtaaatatagatgaagcttcagctcgcctgccgctcaccttgtgctgtgcagcccggttcctaacagaccacagaccccacaccaggtctatctcatttggtctcagagctgtgaatcagccagcaatattttagttgcaaatcactgaaaacccaactcaaagtgacttaagtcagaaagaaattttatgaattcaggtaattaaaaagtccagaagtatctgcctttaggcacagctggatccaagggcacaaatgatgtcatcaggctccagttattctccatctcccagctcagctttttctgtctgtaagcctgattttcaggaaggctctttcctagtgatggagatgaccaccatcagctccaggcttctatcctgctaacccagtaacccagtgggaagagatttacttattccaataattccaagtggagagtgtcattgacccgtttggggtctcatctctacttctaggggaatgaaacactctgagtggccaggcctgtgtcatgtgctaattcctagagccagggaaataaggtctgaggattcaggatggggtgaaaggtggttgcttaaaggaaaatgaaatacaattagcagaataaggggaaacgagtggtctgctctgctcgggcaaaacaagagatgcccattactgtgagggacccttgaagtctggactcttaaatgggtttttgctgatttcctgggtgcatgctaggatgatggggcttgatgcagtagggaagagacgatgtaaaaataataaacaatatataccttcctaga

SEQ ID NO: 506 - protein, 194 aa, Homo sapiens
MGSRSSHAAVIPDGDSIRRETGFSQASLLRLHHRFRALDRNKKGYLSRMDLQQIGAVNPLGDRIIESFFPDGSQRVDFPGFVRVLAHFRPVEDEDTETQDPKKPEPLNSRRNKLHYAFQLYDLDRDGKISRHEMLQVLRLMVGVQVTEEQLENIADRTVQEADEDGDGAVSFVEFTKSLEKMDVEQKMSIRILK

SEQ ID NO: 507 - DNA, 47322 bp, Mus musculus
  misc_feature (1)...(47322): n = A,T,C or G
gcctggatacagaactgaccattcagagagctatgcaatgcctggatacagaagcagaggatcccttttcgatcagacctgtcctgtggttcctctctggccatccaccctttttgattgcttttcagctgtgatcagcctgtcatccggtgctgctctgagtctttgagtttctcgctcaagttaataaacctggaggactgcatcactggaaccccagttcatacctaaagttggaagtgctggtttacaacttagagcatgagatctgcctcagagagaggtgacagcctctaggtaatgagtcttaatctgtgggctgtggctctatctccagcagacagtgctcaaatggagccaaattacaggacctccagtttgggacttctggagaattcactagcacatgaaaacacctcacatccatgttaatgactggaagtgtctgtgttgagtggtaaataggaaaaaacaaagacacaatacatggcagcaactccagcaccttttggtggagggggatcaggaatttaaggtcatcttcagctatgcagctgtggttgatcatatctgtaacctggctcttaggaggctgagaggggaggagctgaactctgaggccagcctgagctacacagcaaagctgagaccagtctaacctgtgaaaaatcctccctcaagaaacaaacacagtcgggcagtggtggcgcatgcctttaattccagcacttgggaggcagaggcaggcggatttctgagttcgaagccagcctggtctacagagtgagttccaggataaccagggctccagggctccagggctccacagagaaaccctgtcttgaagaaagagagagagagagagagagagagagagagagagagagagagagggagagagagagagagagagagagagagagagagagagagagagagagagagaatgaatgagaattggttgggcattgtggtcacacctttaatcccagctctaaggaagcagaggcaggcagatctctgtgagtttcaggacagccaggactacgcagagaaaccttgtctgggggtgggcagaaaaaagaaataaaagaaaaactaaaacaagcaatcaaacgagtatccctgaatgtaggaagaactaaagaaagttttgtctaggtagataaacttattttaatgtatacagcttggatctgaagacagaaaaatcctttctgttactgtgtgctcttggacagctcagtgcttcacctgaagcaggggcacacttgcacttgtagagttcttgcaccactggacatactgcaccctgagtgcctgccacacctccagggctcaggaactgataactcatttttctactgtctgactcaacaaccctccagcctcaggttctcaaaacatgatggaccagcagcatcaatatcagagggagactcaataaaaatgagttatctactcctaagaatcagacactggggaggtacccagaaatctgagtttaactcgcccccgggtgacacctgttacactgacaagcttgagcagcagaggtcttgggaacaggctcgtctctgaaatacagaaagatctctccaaaccttacaaagctcttcctggactagccagtttggtggtgtatgccttaaatcccagcactggggaaacagaggcaggtggatctctgtggttttaaggccagcctgatctatacagttagtaccaggatagccagggctatgtagagacagcctgtctcaaaaggcaaagagctctccttccatctcctcatgacagaaagttattttaaaacgctattaatgttggaagagaatctttccaaacaaagcaaaacgacttgaaataaaaatagtgctgacattttaattccaatgcctttttcaattatctctgtaaacaagtctgctacatgagagcagcctgccctgtggcagatgcatgtcagtatgacctggacttgaactctctttggccaaaactcactgacaaagttggcaaagtttactactctgcttaaggcactgatttcactagccacagcgccattgtcatgttgactttcccataattgagggaataagcaggtataatagttgggaaagaatttcttaaatcgttacatcattctttccacataaaatcacaagagggataagtaaaagagtctcccctaacgagcaagttggttcattttgttttgtcttgttttggtgtttttctctgccataacaagttccagaactcagtggtttgtctgtcttgtttttgtttgtgtttaggtcttcgtgtatatctaaccctgcatgcatgcctggtgcccagaggccagaagagggcatcagacagtccgaatctgcagttacagatggttgtggagcagccacgcgggtgcccacttttgagccatcttagcagaattttaacagaaggttgccgagagcgcagggaacacagagcatcgatgtcaaagcctttgcattttagtcaggccatggtctcacgtgtcaccagccggaaagcagattcttgtcaagattgtagtctgcttgaaatctgttaaagcacaatttaacttacttccctccttcaaaaaccatcagcagtaaagtctttaaaaggagaagaaggaggggttggggatttagctcagtggtagagagcttacctagccctgggctctgtcctcagctctgggaaaaaaaaaaaaaaaaaaaaaaaaagccggcagtggtggcacttgccgggatttagcgcaaggccctgggctctgtcctcagctctggaaaaaaaaaaaaaaaaaaaaaaaaaaaaaaaaaaaaaagccggcagtggtggcacttgcctttaatccccgcacttgggaggcagaggcaggcgaatttccgagttcgaggccagcctggtctacagagtgagttccaggacagccagagctatacagagaaaccctgtctcgagaaaaaaggaggagagtctagtggctctttggggacccggaaagaagcagggagagaagagctaagagacctttcccacttcaagtgagagaaaacacaaagggcacagagatggtggacgatgtccaaacatagtccgttttatctcattctcccatcaatcgcaggagacagatgtgactgctgcctaccccccactgcctacaccactgaccgcagtacacatgccatgggttgttctgaaaaaataaatgactttcggaatgaatgttctggcacaaataaacattcatagcctgcttgttactattattcaattattaccagaagaaataaggagtaactaaagagggtaagtaaccttccaggcattcaaagggtagcacacgctgagggaccatttctacatttaccccttgacttgaggagtcccagaccaggcaaacgaacctgagatacagacctgtgcaaacgctatcctatagttttttttttaaaagatttttttcatttttaaaatctcacacacacccttctgtgctctctctcgctctctctctctctctctctctctctctctctctctcacacacacacacacacacacacactcccatcatgcactagtgcttttggaagccagaaaagggcatctgatcccctggagctggagtgctcaggtcctcttgcaagagcagcgaatgcttttaaccatggagcctatctatctccagcccctgtactcaacttttatgccttcaagccagactgttacctgtacttgtgggatttttccagcttttcctttttcttattcttttaagaaatgtctgaggctccaagcctgtatccttacaaatctcaaaacacaagtccctggaatatggggacacagccctgctcacactgtcgctctatgggagccctggtgaaggcttaaacaccaaaacctcagacggctcagccaagcactttttggaggatatacactcttttttttgtttttttgtttttgtttgtttgtaacatttatttattttatgtatgtgagtgcactgtagctgtacagagccttcatgtgattgttgggaattgaattttaggacctctgctccctctggttggccccactcactccggtcaactccactcgctcagtccctgctccctctggcccaaagatttatttattattatacataagtacactgtagctgacttcagatgccactgaagagggtgtcagatcctattactatgtggttgctgggatttgaacttaggaccttcggaagagcagtcagtgctcttacccgctgagccatctcgccagctacactttttttttttccttgatttttcgagacagggtttctctatatagtcctggctgtcctggaaatccacctgcttctgcctcccgagtgctgggattaaaggcgtgtgccaccaccgcccggcttttttttttttttttttttaattcagcaaatctagacatttttagcaggaaagctttcgggttactgtaatctcctgaaacaaacttcccatgttaaagtcttgagttccagtacttaaaaagtgtttaaacacagaagcactgacaacatcattatattaaaatggggtcattaaggtactcctcatcaacataagtgatgtcctatacgcagaggcagttagaactcagacacacagagggactgactctgaaacagagagaaaacaagccctcacaagccaagaaaagacgcctcggggaggataaaataaacaccccagtcaacatcctgatctctaactctcagcctcagagctaagcgaaaatgaatttctgttaagtcatccagactgaggtatttattacctaagccatagcaaacaatgtacagtttctcaaacctccttaacgggtgtatacaaattgcctaaaatatttccttttgtgtactgattctcaaaagatatctaattgaagaactagaatattctttgttaagatgaaacattcttttatgacttttaacagtgagatattgtagcaacatatgaatagcctgcttcccaggctggctcattgtgtgtttaacagggccactgactacaatgtcaacaacagagaacagcctcacagcctgttctaaagcactttgcatgctccagctgcttcactctaaccaggagcccagaggcccagcatggagctcagaattgttgccattgtttgttgttttggatgaggtctcactatttagccctggctgatctggaactgtgaagaccaagctagttaacaaactcacagagatccacttgcctctggctccggagggccagaattcaaggcatgcgccaccatgtctaggggagcctagcattttgtgagcagacattgcgcaatcaagctaactgaactgaaagcacgctgaacctggacccacggcttcaaaacatccaatctgatcagtgtctgctacagtcagggaaaaacaaaaagccggctgcaccaggtcaggaccgcagcaggaggtcttctgcctgccattcctctcagatcacctgctgactaccctgtcttcatgccttcgtgctgaagtgcctcagggactggacccttccctgctcctgctccagtttctctctagaatatctcagccaatcctactgtttgttttcattttgttttgtttctggatcttcaagacaggatttctcttatatttttcctctgtgagcctagccttcaacggctgagtcatggtggcacatgcctttaaccccagcacttgggaggcagaggcaggtggatttctgagtttgaggccagcctggtctacagagtgagttccaggacagccagggctacacacagaaaccctgtctcaaaaaaccaaaagacaaaacaaaacaaaacaaacaaaagacagggtttctctgtgtagcctggactgtcttggaactaaatttcatttaaatgctagtagctctcaggcttccttctccaagtcaggagtcgtccttcaggtctccatctccagctgcttagctgatgactgcctttggccagctcagtcttatcagctggtggatcagtggctagacagaccgaaccttaaacccctcactcctcctccactacctcagggatgcagcatgccactaggacaggagtctcttaagcagtctagccacattctttcaccttccagtccatttgcaagcacacaggacaatcttctaaagccacagagaacgttttctcattccctttctctgatgcatacacatcttttaaaacttttcagtcgcaaggcacttaggtcaaaaccccgaactcagggagtgggggtgggagagctagagatggctgagtggttacaagtgtgttctgtgcttccagacgaccaagtttggcgcccagcaccacgttgagcaactcacaattgcaactgtcttgtccagggtatccaataccttcctctaggctccacaggaacctgaagacagacgtgtggtataaaacacacacacacaccacacactcacatacttaaataaaaataagtctgaaggaggaaggggagggggaggggacaccaaagcagagctattgttagagcaatcacttatagtaacatctgtgggctagtaagatggctgcatgggtaaaagcccttgatgtgcaagcctacattggaggttgatccctggagcccttgatggaaagaaagaagaaatacctgaaagttgtcttctgtcctccacacacacaatagtaaataataaatacgattcttaagttaaaaataaaacacttggaagagtttttaagtgagctcagacttaaaaggactggttcgggctggagagatagctcagaggttaagagcactgactgctcttccgaaggtcctgagttcaaatcccagcaaccacatggtggttcacaaccatctgtaatgagatctgatgcccttttctgcagtgtctgaagacagctacaatgtacttacatataataaataaatcttaaaaaaaaaaaggactggttcatcaaatctatacacaccagagtttccagttttataattagtcagttagtggtgggaaaaggactattttctcacatgattccaaatgatctcatgtctccaaactttcacatttaaagtctgcaattaaattgttctgtcagagaaccagtgtcatttgagaaatgttaaatactttcctcttgggaggctgtaggaagttaaacattgtcctatactggtttatttcaaagcacaaagtactctgtgtttcctgctgcaccttgggacatcagtgctgactaacaccatgagcttttgttctacgcggctaacatcagcatgcttgaagtaggaatcttcacttcaccctactctccacgcacccatgccttacgctccagtctcatggcttccttctggattcatgaagctcctctctctagtacacacccacccaaatcatactaaattccccattaattatcacatcttccaaatcccagtctaaatcaagttcccctattaaccaaacatcgagttctatattatcaagatatctttggttaccagtaaacaagagaccaaatgtctgacagggactttcataccagggaagctttgggtcatgtaaaataatcaccactgcctaccacaaagtgtgtgtgtgtgtctctgtgtgtgtgtgtgtgattcgttataagctttgtcacgatttaagcagaagtcagtgtacttcctaaaacaatatccattaaatgcatgtgaggacatttgaaatatggcttatccaagtggaggattgactttaattgtaattaattgaaattatggaaaactgaggtatgtgactcctcttccaattgtagatattagaaaatctaaatattgacccaaataaaattcatcaactaaattatatatatataaaatacatgctggatttccaagacctaataggaaaaatgataaaatatattactaaaattaatttaatctggcttttatattttaatgtggttgctaacattctttaaattatgatgggcataggtggctcacccagcactgcacaggcagagacagacagatctctgtgagttcaagaccaacctaatctacatagtaagttacaggctacatagtaagaccttctctaaaaaaattttttaagattacatatgtagatagcactttatttatttggcaagcacttattcaaacatgtaaaaatagttacacaaccattaagtcacaacataaattgaattcaggggctggagagatggtcagcggtttaagagcactgactgaattcaaaatccagcaaccacatggtggctcacaaccatctgtaatatctgatgtcctcttccggtgtgtctgaagacagctacagtatacttacatataataaataaataaatctttaataaataaataaatttaatttagtttcttctcaagagttttaagagagttaagaggaaaactataaatgaactggcatttttcataaatacctacgagtgaaatatagctgaaactaggttggagcttgaagccagagaagatgaagaatcaagaaaagatggcaaagagataatagtagctttggctcagcagaagaaattgggagaaagagcagtgaatatcttaaaaaacactggctagcagggatggaggggggctctgttttgagacaggatctctctattctgtaaccccagattagcctggaactccatgtatagagtagaatggcctaaattcagcgctctcctcctgctcctccctcctaagagttgagattaaagacatgtgccaccacacccagttaaactaaccctttttattccccatttgggggggggggttcgagacagggtttctctgtagaccagactggcctcaaactcagaaatcagcctgcctctgcctcccaagtgctgggattaaaggtacatgccaccactgcccggcctattcgcttatttattaagatccttcccttgtttattccaagcacaagaaactatttaatactcttctataatgaaatcatgagctaaaatgtttttgaattctataatttcattatttaggtttaatagaattcttttgattttatttaaatcaaacctagcagttccttttcattgtgctcctaaagaaatataagtacattaagaaatatatataagccaggtgcccaagcatatgccaataactgcagcagtcagaaggctgaggtcgggagtttcaagtcaacctgggatacagaatatctcaagaaataaacagggtctgcaaaaagttgcctggctccaacgctgtctatctgagttcgagccctacgaccttcagagtaggagaaaactgattcccacaagatgtcccctgccctccatttgccacaccatcgctcgcatgtatccatatacaaatatgtaacgcaacaaataaaaataataatccgtgcattattaccataacttcagaattcactgattatgtctatttaaactagtcacaacgacatcaccagtgtgacttgcacaaactggctgggacaacacaaaacgactgtaaagctgataaaagattgaattatcccccaagaagcttaagtggccgaagaggcaaggcaccgcccatagaattcgtcaccagaggccccgcccatagaggcgtggtttcgcctcaccaccaccactccccgctccggcgcgggtctgtgaggagctcagtttggacaccttagcggcagatgccgcgttcccgaaggcgctcggtcacctacggctgacacaacaacaacctcaggactatcagtctttccaaagaaggacgcatcagagccgccaggcgggcggagctcgcgtgggacacgccctactggtagtgcttccgggacagggggcggggcctccggaagtggccggtcgcggtctgaagctcgttgtttcagcggcggacagcagaggagaagctggtctccggcagctccgctgggtgtgaggtgtggtaacctctgtaaggctggaagccgggactgcgatctgccgagcggcggggtgagaagcgcctgctttcagagctcaccatgtcgcggggctccatcgagattcccctccgggatactgacgaggtgggtgccgagtgtgcagcgggggagggctatgaacttggacgatcccagcgccgattttgctccgcttggtttttggaggggagagccgcagccgagcttctcggcccaggcaccactcagctggtcacctttctggccgcaaggacttcgggaaagttcgcctgcagcctgctccttgttgacagtcggctgtcttccgaggcgcaggggtgtgagcgccgagtaaacctcacctcttacagaggggagtcagtgccccaggggctacctgctgctccaacttgggatttgtttatttttttaaatctccctgggtatctgagagacggctcttaatgccatggaagaaaagtctgtcaaggcacactattaacacagctctctgggcgagataaggggcccgagatttagccgctcctgtgtgctgatggcaacgacccactttcatccatggcgtgtggtttgtccgaataaagctccagcgttgcctcagtcagactagattttacacacttttattttcgatcgaggtagaattcatttctaaaatatggtggtcttgggtacattccagaatatttttcttctaattgttggtgcccacattttaggcatgtatgtgacccacgatactgcctccgtgatttaagtgaccgttggtattcaactttgcctgtcctctgggatagagtttctcaagctctcagacctatggcatcagtgtttcgttggcctatgggttgtacaaggtttcattttggttttgagtaagcaagtcgttgagaattttatagttttagcgatgtgaagaacgaccaacaggatttgcctgcttttctatgctttgaccaaaccagactacaacctgtttgccatgtgtttcctaaataggaacatgtattaattagttcactccattgaaagtgagtacataccctttgtgtatgggcattgatgagtattcaaaacacgcagaagagagaaattgtgaatttaaaaaggaaacgaaacgtttattctgtgttttaggtcattgaacttgacttcgatcagttaccggagggagacgaagtcatcagcattctgaagcaggagcacacacaactgcacatatggattgccttggcggtcagtattcctagagcagatttttctgttgactaaaaaaacataggattttggttctcaagtacagtaatagcccacaggattaaatctgttgtgcatgattaaatcatctgtatgaaaattagtagcagcagaggcaggtcgatctctgagtttgaggtcaacctggtctacttccaggactgtgatggcacgtactcacgaacaatggttatattctcatttatggaacagtaaggtcagtttcccaactacaactctactggtaaattaatgtctgttgataaaggtgagagattcatttaaggtaaatagttctctatattgaggttttaattacttcgtggtaattcaatgaaacttagcttatgtatagatagaataaacattactttccatagcttttcttctaaaacattctggaaggtgattaggctccaagctaatgcagaagaaggcccttttgcagtgaaatttatctcggtatcacgttttttgtcatatttgttcctgccttcataatatgaatgctactagaaattctcagcaaattcagtgtgggaacctataattttagacactctactccctggcattatgtttcctttttatgagcaattgtaagataaactatactcactattcctaaacttgtatgctacaagtggctttcatagaaagatacataagaagttccagccgggcgtggtggcacacgcctttaatcccagcactcgggaggcagaggcaggctgatttctgagttcgaggctagcctggtctacaaagtgagttccaggacagccagagctatacagagaaaccctgtctagaaaaacaaaaaaaaaaaaaagttcctaatgttaccttgatggtcagaaaagtaggtttagaattgggcacatattctgctcaattatgctatggattgaatctaggtccttgaaaatactggaacactcatcttctaaggtgtatccccagccttgcttttaccttttattatgaggcagagtctcactaagtttcccagctgtccttgacctttagtcttcctgctcagccttccagataatcatcttaaaaaatatataattgttagtgcacattgtacctattaatggatttctctatatgcatatattgtgtgttgggtcatattcaccctcctaagctccctcacttccataccctgctgtattccatctactttgaggagttttttttctttttcttttctcaattccagctcacatgtttaaaaaaaaaatctataccatgcttagagttttgtatgtgtcctctagttccatccattttcctgaagctgacatggttcattctttatggctaggtaagactcttttacacatctggtatatttaccattcacctgtatgggtacctacactgattccataggctggctagtgtgccacactgaatgtggatgtgcaggtagtgtttatatgtgctgactttttcctttggatataagactgggagtggtacaggatgcttccctactgattttcctcatccttgtcaacatttgttattgttgttattattggtaatagccatttttactagggcaaggtagaatctcaactttttaaatttttgatttattttttggagtttttttgttttgtttttaaagatttattcatattttatgtgtctgagtgctttgcctgtgtgtgttcttgtataccacatgtatgcctgattccttcagagaccaaagagagtattagacgccctggagctggagggatagacagttgttcgatgccattcaggtgctgggaaccaaacccccatccttgctgcccttaactgctgagccatctttccatcctctggtttacttactgttgttgtctgggatggtattgttgtttgaaacagaatttcatgtagtccaggctggcctcaaaccagctatttgtctgaggctgaccttgaactcttgatcttcctgccttcacctcccaagtagtgggaggtttatgtccccatgcccagcacacagagtacgtttcgtacacacttgcctaatgactaaagatagtgaacatttttcatggacttagtttgtacttagcctttgggaagcatttgtcatgtcattgacctgtttgttgatcggcttacttgtttttgtgtttggtttttggatggttggtttcttagttcttcatgtattctaaagatggattctgttaggtgaatagctggcaaagattttctccattctgtaagccatctccatcactctgttgacgcctttgctctgtagacactcattttattgtagttctgtgtgtcagtggttctgttttctaaaatgtctactctaagaaaatcttcccagctaggtgcagtggcatacttctaaaagccagaatttcagagtctgaggcagggggatttgaaagtttgaagctagtttaggctccatatggaaactgtttcaaaaaaaaaaaagtacatcaacagcaacaaaatgtcttccacccagtgtggatagactaaaaagtattcttctaatggactttgccatgctgctagagcagtcaccttttcctattgcctggagattttgatcctgttgttaatggatagagttggtattaatgacagagtaaatgataaggctctgtagattgggttccttttggggaaactggtcttgggtttaaagaagactttgttcaagttccaacatgactgctgtttgtctttaaacaatactctaatttctgaggctgtttcctcaaaactatgaagatgttagtactgactttattaggtagttgtaaggatcagagaaaatgtgtgtagctcctggcatgttctgtgacctatagacagtagttaatatagagtagatattccttttatattagctatgaagcatatgcctaggaagttaataatctgtcccaaagtcactgataatttttcatagaggcaaaaccagagcccaagtgagttgtgttgttttggagacagggtctcttgtagcatgctagaattctgctcattccgtactgggggtgaggttagtatatatgctgtatgcatctgatgtgtgttgcccttgtgtatgcatgtggagcccagagaccaacattaactatccttttttttttcttggagacaagcttcttttagcataattaatttgagatttattttgtcaatagttcacttctttgcatcacagaaatataccacagctattttattgatacacttgttaatttggcttcccatttttactattacaaataaaggttctataaacatttgtgttgttatgtgtgtggacatgtgtttagtgattttaatttcatcctttgcctaaagctggaatactacaagcaagggaaaacagaagagtttgtgaagctgctggaggcagcacggatagatggcaatttggactatcgagatcacgagaaagaccagatgacttgcttggatacattggcagcctactatgtacaacaggctcggaaagaaaagaacaaggacaataagaaggaccttattacgcaggcaactttgttatatacaatggctgataaaattattatgtatgatcaggtaaatcaaatttgtttcgatttacaagaataccatgtgaaagcaaaatgtgtatagcagattctttgtgaaagaattcttactaaaataattgttgatacagtcaaaaaaagaattattgaaattagaatcgcattcgtcctcaaactgttatatttgggcaaatttagtgtatatgtacatgttgaatccatattcccaatatcttgggtcaatttcaaacaggttttaaggattgtgacctttgtcttgttgctgtcttaggcacagagttgcatttcagggtaagcttctcatttgtacttaaagattcttactggtagccagctcctctggtcacttacagaggagtgctgagctcccacccactgtggatggtaaattgtctctagtctgagtgaagcctgtacattacagaaccatttgttgggaagagcctgcttctgtctgctcgagggcgacaaaatggaccaagctgacgcacagtttcactttgtacttaaccagtctccaaacaatattccagcccttcttggtgagtgatcttcagcagggaccataggttctagttggtcatcattgaccaggagcttctatttgtgtgtgtgtgtgtgtgagagagagagagagagagagagagagagagagagagagagagagagagagagatatgttttatatgtgtgtatagtacaaaagtatatattataatatgtataaatataataagctagtatgtatatgtgtctctaaagagagtcctggtaagttttttatcattttggcccaaggtagagtgaagtgggaaaggaacctctatcatattacctgtaggcaagtctatagagcgttttcttgaatgataatagatagaggagggtctgactcactggaacagtgccactcctggggagacagtttggggtggtataaaaaaagcaggctgagcaagtcagaaggagcaagccaggaaacagcattcctccatggcctctgcttcagtttctgcctccaggtttctgcttgagttcctgtcctgacttgccttcatgacagactaaactgtaagctaaaatatgtcctttcctccccaagttgttatggtcctggtgtttgtcacagtaatcagaagcaaagtagaataagttgttgtttgcttccaaagagtcaacaagtaatctcttcatagactaactgcaaggtagttatttatattgtacatgaagacttttaggactgaaatattgcactacctatggaaaacccattcaagtatttcttactgagttataaattagtgtatagcataacaaatgtatgttctttaatcaacaatgttgtttttaaaaactacagggaaagcttgtatttcattcaacaagaaggattacagaggagctctggcttactataaaaaagcattgcgcactaacccgggatgtccaggtaggaggacttttaattctaagctgtttatgatccaatttaaaatgttgaaaattggttataaagagatagtttaggagtaatgaaatgacaggatcaaagttattttgttccagggttggggaaatggctcattagataaagtgcttgctaccccagagcgaggcctggaatttgaaaagtcaggcaagtgtggtagccatctgtaatcccagcactcagaaggcagagatgggatgctggtacaagccagctagctacacacaccagaattagtgagtgctggtttggttgaaagactgcatggataaatatgatggagaaggatggaggccccactgccgctgccgcaccccccccccccgattatttttttccttggtgcttgatttaaaacctaatgcctaatggcagatcattattatattttgacctgtgctacttttcttcccaaataattttcatttagtatatttttgttgtgtatcaactatgtgccaggcactgttgtgtgcagagaatgcagcagtgaaccaaaagataaaagtttctgcctgctcatgtaattcaccttccagtgaattaaataagaaacacagagactgtggaaggttgagaacttgaagcaaaataggtctatgaaagcattgaagaattacttacaaagggtggccagggaaacctcccagggatataaagttctagaatagggtcatacagacatatgggagagtatggtcctggaaaaagcacagcgggtacaaaggtcctcagaaaacttgtgaaataccatggaggccagtgtatccagaacggaaatgggtggaaaggcataagaaatgagatcaaagatgctgcccagtgcttttcatgttgagcgtctgagtttatgttagatacttcaagcttttgacagaaatgggaacccttggagggctttgggcagaagaatgtgtgatctgacttgtgcttaagagtaccattggggggctggagagggagttcagctccctctctggagttaggagcactggctgctcttccagagaactaaattccctatactcaaatggcagctgaaaactgcaacttcagttccggggaacctgactccttcacacagacatacatgcagataaaacaccagtgcacgtagaactttaagaaaagaataccactgagcaggagtctagagtggagggagtgaatgggtaagggcagaagcacgtgaaccagggagaagattcttgcaagtgtgcaggtcacagacaattcaagttcaaaactgaggagatgacagagggtagtacatgtggtcacagtctcgtattttggaaggagagccggtgtgatatgtgaagcaaaaagagcaagaatcaaaagctgaacaaattttaagagtgaagctacattttactacatttggaaaacagtcctatagtaacctggttagacattaaaagactgaatacctgtctgaggtactggcgggaagacttttatcttggagttcatgaaagaagtctgtgatgaacaggttaacttgaaaaccaatgtattgatgatgcaaaagccaggagtgcatgaagacaggaggagagtaagtgtagacaggaaagtgccctaggacactcgagagcagtggtcctcagccttcctaaggctgacacccttcaacacagctgttcatgctgtgatgaccccagccataatgttatttttgttgctacttcataactaattttgctactgttataaattgtaatatatctgtgttttctgatggtctttagtgacccctatgtaaaggtcgtctgaccccaaagaggtcagaacccacaggttgagaaagctgctctgaagtataaagaagatttggaaaagcagcctaaggagtagccagagataaggaggaaaaacaaaaacctccaagtaatgtccttgaagccaaatgagaaacatttgcaagggtgatagactctgtctcattgtatggttaggccagtgaaacgggctgaaggcaaatcactagtgaccatgattaaatagtttttctggagtagtgggcataacacctcactagagtggatgccagaggaaacagaagagaggaattaggccaggcgtggtggcacatacctttaatcccagcactcgggaggcagaggcaggtggatttctgagtttgaggccagcctggtctacaaagtgagttccaggacagccagagctacacaggaaaaccctgtctcgaaaaaaaaaaaaaaaaaaaaaagagggggggggaattagaggcaccacatgtttgatcagtcggggagtctgttgcctggaagaacagcagtgggctggcagccggaaaggaaatggaatcaagagacttttctgtaagatggaagaatgtttgaatatggctgagactggtccagagaagaaaatattataatgcaggaaaaatgagagatggtactgtcatggtgtcttcaaataaatgagaaagaatcccatgaccactggagtgtagccttagggaggacatgtctgtgttctgttactgccttgaaatgaggtagattgtatgagcatagctcaaatgaatgacaccagttctgtgtgctccagacatagactgaaagtcttgatgaggggtttattctctatttaaatagtaaggttattcatgcgtgtaccagagtgtatgaactcacatttgtatgtgtacacacatatacataatactttttaagtagaaatggagccggtgatggtggtttactgcagcaggtactataagataagaaaaatgccattattatagatattcttttgtgtagttcgagaggtacccataagaggggagaaggattagaatgatatggtctgactactaatgaaatcaagtttgtggtcggctaacaagtcttaaagagtccagacactggaaattaaactcttaaagtatcctagattgacaggacaaatgacttgattttatttattttttagctgaagttcgtttaggaatgggccattgctttgtcaaacttaacaaactggaaaaagctcgactggcattcagcagagccctggaactcaactcgaagtgtgtgggagcactggttggactggctgttctagaactcaacaataaagaggtatgggagaaagaggacctctagcttcaggtttatcaggcctgctgtcccatatctgggactcctagaacgaacgaactatgctttagagatgtagattctaggttatagttgaaaaatgtgctgcctgggctgcaggcactgtcccaaagcaagcatatttctgtggtatagccgtgagaagacagcctcacagcttaggtaagatgttcctgctgccatctggtttaagaccagcacacataccacacacccctcaaaaatggctttagaactttctgaagtttagaatctcagatgagagattgtaggcccacagatctgtctaacatgtatctgacaaagtaacaaatacacactccactgacttaaacaagtgttaacttttttagttcactaaacaaagtgtctgagatcttacacttgacactacaatgttaccagagtcggtgattttcaataactttatgttgactccctccttaatgtgtgacttaaccaagtatctatcaccttacagttactagctggttactgcttgttccattagtcttacagaaaggaaggaaccaagagactttcctggagagctttccctcagaagttgcagctaatgtgtaaaggcggttcctgttctgcttctgtatttaattgtacaaaggttgccagggtttctctgtcagcactgttgacagttgagccttgagttgtctttgagtaacttctccttactgaatgtttaccagcctctctggccttgaccattaaacgccagtaccatctccatagtagtaatgacaaaacctgacatcgtccctactgagaatttcttccttaggccagtctctagaggaggagaatagattatcttgactagctattcagtcatgatttgtcacctgggattggaaaaaaggaagagaatttgcagaaatcaaaatgtctcacagactacaaaactctcttcagaggccaggcatggtgaggcatggttgactcttaccacacaggagacagatgtaggcatatctgtgagtctgaggccagttttggtctacatagagggctccaggctagcgtacatggtaagaccatgtgttataaagaaagaacagaaggaaggaaagaaggaagctgtgttcctttagcaaggtaaaatggctgccacaccaagaaggcaactgaggcaggactagtaaataggaaacctcaagcaagaactgactaagataaggaacgtagcccacccacagaccacacacactgtcttagttagggctcactgcttactgtgagcagacaccatgaccaaggcaacgcttacaagaacaacatttcattggggctggcttacaggttcagaggttcagtccattatcaaggcgggaacatgacagcatccaggcaggcatggtacagctggagctgagagttctacgtcttcatctgaaggctgctagcagaatacttacttccaggcagctaggatgagggtcttaaagcccagaaccacagtgacacacctactccaacaaggccacacctccaaatagtgccactccctgggctaagcatattcaaactatgacacacaaaattaaatatgattaaaatggggatttcattacaagtgaatattaaaaaatcgcacccacattgtatctcacagctgtctgcgaatctgatgctttctcctgccctccacagccactgttcacacatggtatacatgtatacaggcagaatgctcatatgtatcaataaaaataagtcttagaaatatgttttctattctttgttctcagagtcagcataagttattaagactggcaccaaatatacttttgttaagaaaactatattgtaacaatttggcattttccttatttgaaactttgtgtcttttatgaagaatagcaacctgtcttatggtgttgaaccatagatataggaccttatttctgggcagtgctaattaagagattgttttactctgctgtgttacattgttttcttttaggctgattccatcaaaaatggcgtgcagcttctttccagagcctatactattgatcctagcaacccgatggtactgaaccatttggcaaaccactttttcttcaagaaggtaaaatatttttttaatttatttattttgaaatctggttttttttctgaatatagtcagtacatgatttttgtttaacttgggaagaaatttgaaaatgacatttgtttttgttttactcccaaattaggccttgtattagttgcctgagagtgagcacattcattcattcactaaattgatatgcactgtgtgcagcctggcatgggagatgagtaagactacttactgtctgcactcaagcaaaggcctttgctcagacagagaaatgagcaagtaatacgtggtgagcggagatgtcaccacagtgcagaagctgtgagacctgtgttaaactcggtgtcactagggagttggaagaggacaggcgtgggctggaggaagcctcctcagcctttggagaagtcaggacatagcatacagttaggcccagttaggaaggacttgcttcttagaatttgactgtagctgtacaagtatcagagtcaatggtggttctgtttattttcacatgttgatcttgcctgttaattctaccattcttgtggaacagtattttagatttcttaccataccaaatccaaggtactatttaaaaatcatacataatgagttgcactgtgaccttttcattcatatataatatatataatatgtatatatatatatatatatacacacacatatatattatactttggtcatatccctccattttctcttatcccccctcctgctgatccttgactttgtccaattagtccctctgctctttttgtctgttttcactaatttatttattcacttgacatcccaatctgtctctgactctgttgcctgccattggattcccttcccctaactggactgcctggttgggcctcagtgtgagagggtgtgcttttttatcttagttggtgacccagtgggtctaatcaggattgcttgtagcagcttaggtgtgcgattgtttataagctcaggggcagcttaccagaggctaggctacactgctaaagaaaatgtctctctcacccaccagtgacagtttttatacaataagcaagagagtttaacctgctatattagaaccagggagtaaattgtactataaactttaaaatacttgagtaacaatttaggtaaaagttggcagtgtatcagccttactaacaggagctcatatgtaccgagtgcttactaaatgccaagcattggtaaaagtgcatgcccactattcactcctgttagctcacatctaacctgggaggtaagtaggctaatccttcctgctttcctttctttcttgagtgtgtgagtgtggttgtacattatgaatttatagttgtgtgagttgtgtgctgtgggtgagggtgtacatcatgaatccacagttgtgtgagttgtgggaggcaagaggtcggtgtgaggtgtcttcctcaatcacccttttccttttttaaaagaaggttttatttttaatttttgtgtttatgcgtgttttgctgcatgtgtgtatgtgcaccacatggtgtctagatgggatgagaagagagcattggatcccctggaactggggttacagaggattgtgtgagccaccatgtaggtgctgagaaccgaacctgggtcttctgcaggagcagcagctcttgactgctgggtcacttctttaatccctctcccatgattttttgggatggtatctctctgactctagagctcattgattcaggtaaagcgagtgcccattgagctctcccttccctgcctcccatactgagctcacagacgcatggccaatcttgcgtgagtagtggggacctgcacacaagtcctcatgactgccaagctctttctaactgagccgtctgtctagcctctgcccagtttcttgatgagtaaattgaggcaggttacaagcttagagcttgatgctgcatcattcttgattgctgcttgttacagttatgatcattacacacattattatatcacatagttattatttattgaggttaactgttacagtgctaaagttcaactatttagggagaagatgaaaatataccttatagctaaatgaaatgttaccaattactagtcaagcaaccttctgacatcactcaacttttttccggtatcaaattcaggattatagtaaagtgcagcacctggctctccacgcattccacaacaccgaggtggaggctatgcaagcagaaagctgttaccagctggctcggtccttccatgttcaggtgagaccattgtcaccttcctaagtagtccttaacttagagggtttcaggcttctggccactttgacgtgttgttggtcttgtcttattctcatttctcaggaagattatgaccaagcctttcagtactactatcaagccacacagtttgcttcatcttcctttgtcctaccattttttggtttgggacaaatgtatatttatcgaggtgacaaagagaatgcatctcagtgctttgagaaagttttgaaagcttatccgaacaattatgaaactatgaaaattcttggctctctctatgctgcttcagaagatcaggagaaacgagacatagccaaggtgtgttctaagtcttaggtaccctgagactccagctgtggctagcacagctgtgagcagtatatggggcttcttacgcagcttacggtagccatgtttaaggttgtcattgcttactttgacagtgttattttaatgatctcatttatcccagggccatttgaagaaggtcacagaacagtatcctgatgacgtggaagcttggattgagttggcccagatcttagaacagactgacatacaggtattaatgtctgctctttatatcctaaatgatgtgttttaataagctggtgtagggtttctctttgatctgtgagtaaatcttactctgtctacggtcaaatgcagggtgccctttcagcttatggaacagccacacgcatcctgcaggagaaagtgcaggccgatgtccctcccgagattttgaataatgttggggccctccattttagactcggaaacctgggggaagcaaaggtaaagaaacaaaaccttccttttttctatgcttgaccaagctgcaggcacttgctcagctgtatccataacagtgccttttcttcctcacagaaatacttcctggcctcactggaccgcgcaaaggcagaggccgagcatgatgaacactactacaatgccatctctgtcaccacatcctacaatttagccaggctctatgaggccatgtgtgaatttcacgaagcagagaaactgtacaaaaacattttacgagagcatcctaactacgttgattgtaagaattttaggcttttttgggggggagagaatgagaatgagagagattattcctaagttcccataataacagtaaaaactttttaggaacgaaagtctttgttaaagatgcagtctggagtggtagcactcttctgtcatcctagtactcgagaggtagatgcagaatggatcaagagttcaaggccagcctccctacctagcaggtttgaggtcaccctggccgtgtatgaggccctgtctcagaaactgaagtaaggggctcaggagatgactcagcagttaagggcactagccattcttccaaaggatccaggttcaattccaggcacccacatagcggttcacaactgtttgtaactccagttctaagggacctgactcactcacacagacatacatacatgcaggcaaaacaccaatactcattttaaaaaaaaatgaaataaaactaacattgcagtttcatttacttatgctgggaattacaaggatcaacaagagtcacttgagttgtgctcagtagctgtgagtctgctgctgccgggctgctgcaggcgagcttcactagttagtgggcgtcatctgcaagcgctcttccttcactagagggttttgtttttgtttgtttgtttttttcttgaaacaattattactaaaatgtcctagtttgagtttttacatccaaggccctgtaaatgattggcatttcaaaactaatgtgtgttctctgtggcagtttcttctctcctgggcttcactctctgtagtttcatttgcctacactcagctctgctctcaaaatagtagatgaaaaaattctatacataattcctaaatttcaaattgtggaccgtcctgcatgtggtgctgagacctcatggctctccactccagccagcccaggatgtgcgttgtcccagtactgtcagttgctgagcagtcatttcagagagcagcttgactgtggggtaccagaatttgtgtgcagtgatccttacagtattttatagtgatccagccacatatctttaatcccagcactccagaggcaaaagcatgggggtctctgagctccaggccatcttgggctacatagtgaatcacaggccagccaaagctcaagcatagtaagaccagggtcaaaatagaaaagaaaaaaagaaaaagaaagaaagagcgacctagtggtgcagtttttctttctcctagctagagtgatgtgtctccatgtgtggggcttttctcttctctctgaaagtattaacaaaattcagctgttccaaatgtcagacttcagtgttaggacccgttagacatgagattgtgaaaatgaattaaacgtgcactttcaggctatctacgcctaggagccatggccagagataaaggaaacttctatgaagcttcagactggtttaaggaagcccttcagatcaatcaggttagtggtattgacttggtttcagaaatcttcttcttttacctttcaaaatcagtctgtcagttcagtggctgtgatgtttcccgtaaccatggcatctctgggtttagtggcttgttttatctttgtctcacttgttaaagactttaaagagaataatagtttgtatgattagtcatctcataatcagaatcttttttttaagtatataaaactatttcccttctatttttctcttccttgtctgcctcctgtctcctgtactcagcccggtagcctgctgagaacaacttccagagtcagtgtcttagcatttgtaggttatctgagtttctgatcgtggctcacagtaagaaggctacacattaaaagacagctttgccgggcgtggtggcacacgcctttaatcccagcacttgggaggcagaggcagacaagatttctgagttcgaggccagcctggtctacagatcgagttccaggacagccaggactacacagagaaaccctgtctcaaaaaaccaaaaaaaaaaaagacagctttacaagttgttagttactcttcctggtgggcagcacagttatcatttccttccattctgttgcactatgtatgctgatacaggcaccacattgatcttgcagtttgctaacaggtctcaattctcagtctgaaagccaccattgtggtttagctttaaaccttttcagctattagccattttgggaaagatgactgattttctcagatcccagattgcaaaatttacttctttatatatacataggatcatccggatgcctggtctttgattggtaacctccatctggcaaaacaagaatggggcccaggtcagaagaagtttgagaggatattaaaacagccagccacacagagtgacacctactctatgctggcccttggcaatgtgtggctccagactttgcatcagccaacccgagaccgagaaaaggtaatctcctctctccttcagcaggattagtgtccatatccttgttgaatttttcagtaattcttctttcctctaggaaaagcgccatcaagaccgtgccctggccatctacaaacaagtcctcagaaatgatgccaagaacctgtatgctgccaatggcataggtgactagaagccttgggaccaataacaattagtgaagttaatactttcagggatgtcggtagatgaggttttcctgttcagtgcagcatttagtattggactttgagttgttagagcaacagtcaggcctcttactgtcagcctttgtgtaactttaggagctgtcttggcccacaaaggatacttccgtgaagctcgtgatgttttcgcccaagtgagagaagcaacagcagatatcagtgatgtgtggttgaacctagcacacatctacgtggagcagaagcagtatatcagcgccgttcagatggtaacgtctttgcttctccggatagttgcatgtaatgtggagccatggcttccttaacctttctggtcccatcatggactttcatgtcatctctgatactgtctgctcagaaatttataagcatgtaatgacaaagccaggtagctatgagccgcaattccacggatccatgcctcgggcagggcagatcctctgactgactttgctatctctaaagtggaagtctcttaacctcagagagttttgagcggatccactatcagaagaactgggcactaacctgtagaacaaatatccgctaaatggaaggttcggtatttattccctcagtttctgaagtgaaccgtgtttcagaactgttaagtgatgaagttgttcatgtcgagtctctccttagtggctgaccttgaccttgaccctgtgttaaagtgtcttcccacatcagcctcccaagtagctaggattacagtcagacggcagccctgctttacttgccttatcttagaattttacttttccttctatgtgtgtgtgtgttgtatgaaagcacgccatgtggattaggatgcctcaggaggccaacgaaggctttattctgctggagctggagctcgggctattgtgaatcacctgagcacaggtgcagggagccaagcttaagtcctttaagagcaggaagtgttcttcatcactgaactatctatcctgccccactgtttatcttttaagataaaagaaatagaaaatgaaaaaaaaagacaaaaatggaaacaagggttgtatctgtagattttgtaagtttctcatgtttgctgagtacttcagtgtaaggaaaagtatactcgatgttttcaggacattaagaaaacaaagctcagccgggaaaaaaaaaaaagaaaacaaagctcagccgggcgtggtggcgcacacctttaattccagcacttgggaggcaggcagatttctgagttcaaggccagcctggtccacaaagtgagttcaggacagccagggctacacagagacagagaaaccctgtcttgaaaaaccaaaaaaaaaaaaaaaaaaaaaagataacaaagctcttggtgtctgtgagtagagtaccgtcagagcaaaagaggcttctgaacaaagaggacaagagtagttagtccaggcttcaggcttcacgtactaaactgatcagagggatttgcagagctcagagagcacaacccagagcttgtgttcttagagacaagccatcccaatctgcagaaccttagcactgccttctagaatgcaaattagccattagagatagtccagaaaattaccttgtcagttacctataacaggatgtgtatatgcttgtggtcaaaaatgttgtttatataaaaattaactctgggggttagggagatgacactatgtgtagaagtgcttgctgcatagtcatgaggactaagttcagattcctagtacccatgaaaaatatgttcattttcttagtgctgtcagaagtggagacaggagaatcactgggatagcaaaacaggccatgagggtggaggggtggcaagctccaggtgagaaatcctgaccatgagatagggcagccagtgacagcaagacatatcaagacatctgacatcttcttctggcccctgtatccacccctcccttcacacacgtgagatacagatctcagacacacactagagtaaagaggtgaaatgaactcagatgttcatttgcaggttgaccaacatactagctgaagtgtgagacttgtatgctcattgacacagatcccagaggaagatgttaagagtgtgtcacccagagggcccaggtgtgacttgtcatggtggccatgatgaattgattctggattgtgtcctaaagataggagaaaggggtttcccagctaaggttgaggcaggcaggcaggcttaaatctctttaccttttactcagcactggtccaaattccaagtggaaaaagtattttgatcctagtttttctgtgaacagatttttatgttgtaaatacgtaaactgactaatgtcagaagtcaactccagattagtctctgaaattagccaaattggagtgtcttttcagagctttaaaactgctttgaaatgcagacacagcatgagaatacctccctgctgtgttctgttgtcgtttgtttatttttgagacagagtttctctgtgtactggctgtcctggaacttgacctgtagagcagcctggctggaactcagagattggcttgcctctgcctcccgagtgctgggattaagggaactcggcaacactgcccggctctgctgtgtttctaaccagcatttcctttctgtagtatgagaactgcctcagaaagttctataagcaccaaaacactgaggttgtgctctacctggcccgcgccctcttcaagtgcggcaagctgcaggagtgcaagcagactctgctgaaggtaacaggactgcatccgcccccgcccccgccccaccccccaaatggctgcctggcttttacttgtttactgaatgcttttggtggcattcagtcataagaagctacctgcattgctttctgtttacaggccagacacgtggcacccagtgacacagttctgatgtttaatgtggccttggtcttgcaaagattagctacctctgtcctgaaagatgaaaaaagtaatctgaaggaagtccttaatgctgtgaaagagctggagctcgcacacaggtgagagctctgaggaaaggggctttacagtggtttgttgccttaaaactgcctcaggagattaaaaaaaaagattttcctcaaaagaaaaataataataataaccattaggggaaagcaagcattagaggtctagctagcagtttagtttaaggtcaaagcacacagttgccatgtggtggcgccatactccaggcagagtccaggcaagtcagccttgaagcctgattcctagagctgcctggctggctgtgggctctcggggattttcattcacctctcagcagtccgagccagtgttttacacttgtgagctgtttcgtctccacttgtgttggtttcatgttctgttccagtgtgtctttatgggatgttgattttcatcaagctaggattaaagatcttatcacttactgcttaacagatttattcagctcagttcaaatgtgtttaaccttataggacttagcagttcagtgtgtggtagatgaaagctcccatctctgatgatcagctgtgctattgttcatctctgttaatgtttcttgcctcatctggtgaagagtaagtgctctcgtgacttctgccccacccaccgtgctgacacagttagttagaaagtttaatgtttactacctgttgctatggttatttcttagtttactgacagtattaactatattttacctttcttgatgaacttctgtttattaaacagggccttaatatgaggattgagtgaaatatcttttatcttctatcttcttcttccatttaggtacttcagttacttgagcaaagttggagataaaatgagatttgatttggcccttgctgcctctgaagccaggtaatgccctattcacagaaggtggcttgggggtggggagcgggggacggggagtaggcacgttgggtgtggattaggagagtgtgaccataacaaagtggtcctggccttctcggggccacttattccctcacccacaacaccttttcagatttcaggaaattgatgtagtcttcttaggttgttggaaagtgctttctctttctgttgtctttttgaggcatggtcttgctctgaagctagactagaaccaggatcctcctctcatgctacaagcacaggcctgagccaccacacagctaagaaatacgtggctgcttttctcacgttatgtccatgaatcaagacaggaattctgagttggggaacttggaacagtgactttaaggaaagcaggtgctcttaactggatattatgtctttgcatctgaaatattaggcagtgctctgacttactgagccaggcccagtaccatgtggcccgggcacgcaagcaggatgaggaagaacgggagctgcgggccaagcaggagcaggaaaaggagctcttaagacagaagcttctcaaagagcaggtgcgtctacactgagctcaggagggcgggtgcctctgtgtgggaggagctagccctctgtcttctctacacttgtttagttctctcttctttcctttcctttcctttcctttcctttcctttcctttcctttcctttcctttccttttcttttcttttctttatgattttttcgagacagggtttctctgtatagctctagttgtcctggaactcactctgtagaccaggcaggcctcaaactcagaaatccgcctgcctctgcctcccaagtgctgggattaaaggcatgtgccaccactgcctggctgtttggtttattataagaacattttgatcaattcccatatatccccttccccccattaggaagagaaacgtctcagagaaaaggaagaacaaaagaaacttttggaacagcgtgcccagtatgtggagaagaccaaaaatatccttatgttcactggcgagactgaagcaacaaaggagaagaaaagaggtggaggtggagggcgggtaagatctgacccactgtctgcagccacctcagaggctgcctttgagctttctaaaacgaagagcttagtttaattggctccgtacttacttcttaaccttgacttcctctaccaaggggtagtcttctaacacagatcgcagtgtccggtgtgggcagtggtccctgcttttgtggtgggtgtgatgctttgggtgaacatgggctcaacacacgtactctgcagctcttacactgccgacttgagcaagccaggtagtccctgctcccatgggagtgtgacttacagggtttacaatgagcattcgggagaactggactttgaatcatggtcttctcccaagctgaggcatctggtttgacgtttggaatgtgatgcagggtagctgcagagaccatacctccctcccagtcagctccatggtcatgggggtaaacaaccaacacctttctgcattcccagagctagggtgggctaaatgccttttaattgaaggtgtgcttgccttgtgctgacttctcaggaagttgatgacatctcatgtcaagtgcagaaagtgtgggcctagccaagcccctcttccacatgacttagtaaaagctcttcacttgtcagagacccgcaagagcgctctccggcctcctgcgccctagctgtgctctctctgcctggaagtgctgatgtggtctccttgggtccatagcgttccaagaaaggaggcgagtttgatgaatttgtcaacgatgacaccgacgatgacctccctgtatccaaaaagaagaagagaaggaagggcagtggcagtgaacaggaaggcgaagaagaggaaggtggagagaggaagaagaagaggaggagaaggtagtgtcctcattactgtttaagcatctacaaaggcgagagaccttttgctttgtttataaatgctttgctttatttataatcttcccaaattgcctccctgctttagcttgtttcagaatctcgagcatttaatttacatgtgtctctaggttagtccctgaaacagctgatagtcacagtgtccttttgtttcttgaattagggtttatgtatcccataccagccttgaatttactgtgtatcccaggttggccttaaactcacagagatctacttgtctctgcctccagagctctgggattattggtgtgcaacaccatttgcagttttcttttcttataatgtattttggacacagatgtgaattgagcagcctgggtggcagcttcattgactgcatgtgcagtactggccgtcactgagccattcctctctggaatgtgagtgatggatgtgaaagtgccctttcaccacccagtgccatctgtcgcacgctctcctgcctaggagtcttctttcggcaattttctcagacccgtccttcctgtgccttcctatccttgagaaagaacctattgatccattcagatcatcacttgtgtagctgtaatgaggatcttggtagcagctgagaggaaggaaaagtaggggaaagatttggagatccaaaacataggttcctcactcaggcactgaaccttgtgcagatggcagtgtagatggaagagggagccgcatggtgacagggtaatggcagctgtcacgcagaccagtccctgcagactgtagagcctgtgcccttgagtgcatagtatagctgagtatcagtgtccatacagaatggcactactgtgatggcagtgtagccttagacccggcagctaccaacctcctgacagcctctcattcactattcaagacctccaaagggagaagagggatctgaggaggaggagacagaaaatggccccaaaccaaagaagcgccgcccaccgagagcagagaaaaagaaggctgtgagttctagagctgatttcagctctgtgtgtgtgtgtgtgtgtatgtatgtatgtgtgtgtgtgtatatgtgtatgtgtgtatgctgtgtgtgtgtgtgtgtgtgtatgtgtgtatgtatgtgtgtgtgtatgtgtatgtgtgtatgctgtctgtctgtctgtctgtctctgtctgacagagtgccacagtacactcttctgcagcttcttctagcacaaatgcttgctttcattggtggctgttgattctgttactataataaaacgtagctagtaagatgtcccaataataagagaagcccaactaatgggttttgcttgacattctctagcccaagccagaacgcctgcctccttcaatgaagggaaaaataaaatccaaagccattatatcatcaagtgatgattcttcagatgaggataaactgaaaattgctgatgaagggtaagaaccccccccacacacacacaccttggtaaattttaatggtaaataagtcccagtttgatagggggcaggaatcccagggtaaattctaactgtgggaagctacagtagctgctaaccagccagctggaccctcttctgtgtctttgtctttagaggaaaaacagaactggagagcagatgactggcagtggtcagtgtgctgtcctcgccagcttcaggctggccttgtactctatgcctagctgtcttgtagcgaggagaaaccacgacacatatcagcttagctgatatcctagatggcacactcatccctaagcaagtgtcatctgctgcccagcactgacaggccagcaactgctaggactggcctggacctggccttgtggagatgaggaacttagtgaccatttcttcccctgctggagacacacctctgccttccttggtggacttagcttacccaccctcagctcatagccttgatgacgtgactcctgactgcgcttgcatgtgtgtttccctcttttagatcgggacacaaggagcctttctttagtatgtaggacgctttcccttctccctaaccttcccagtctgagtcctgttggaatgtgtcatggaaaccagaactgctcagcataagtctgaggcagcctctctcagcgcttctgacatattgaagcaggaggccaatatcacagctgctgctatctccctttccctgacacgtcaaccaacagtgaaggaagctgggaagaaaagttagtagcctaaggccccttacttagccctggcttcctgtctgataaccttgtccttgtgaagacctggggccttcacaaacctgagaacagcactgaggtcactcttcttcaggtgtctgttgacatggatgttttaggacagaagtgttctgctgttccagtcttaggacttctgagtctcagccaccatcagggagcccatattttacttgttttgttttgttttgttttgtttttcgagacagggtttctctgtatagccctggctgtcctgaaactcactttgtagaccaggctggccccgaactcagaaatgtacctgtctccgcctcccaagtgctgggattaaaggcatgcgccaccactgcccagacacattttagctttgtgcctaggattccccattctgaccttctgagtttgaaattgaaaaatgcctgctaaacagaacctaacactcactgctcatgtgcagactggctgccggtcactgtgtgctccctcattgttgatctcagtttacaatgaagtgtccgcatttacagaataggacacaaaacaagtaccacaggccccagctcctgtgtaacgcacaaaggctgacccagaacagaaagtgcatttggctgtcctagtgtctcatcctcacctctctcttccagacatcccaggaatagcaacagcgattctgatgacgacgagaggcccaacagacgcgcctcatctgagagcgactcagatgacaaccagaacaagtctggcagcgaggcaggcagccctcggaggtcgggtagacaggagtcggatgaggattccgacagtgaccagccgtccagaaagagaaggcgctccggctctgagcagtcggacaatgagtctgtgcagtcagggagaagcccctccggagcttctgagaacgagaacgattctcgcccggcttctccaagtgcagaatcggaccacgaatcagagcagggctctgacaacgagggctctggccaaggctctggaaatgaatcagaaccagagggctcaaacaacgaggcctcagaccgaggctcagaacatgggtcagatgatagcgactaggtttatttcatcaaagactccatgggttgggaggagctttataatatataaaagctgtgataagaaacctttcaggtggttagtcacttgtaaactttttcttaaggcaattttttttctacttgtatatttactaacttccaagagacatttcctgtgctggagagtccagtgtcccaagctggagcagtgagactcctgcattgtggtgcagctccacctgccatatgtgaaaactgcagtgataacacagatgctaaagcattcccaaggcttgcaagccaggctagcccctcccctctcctctcctctcctctcctctcctctcctctcctctccggtaggcagcatgctgctatgtacaaacttgtaccaaatgttgcagaagcagagataaaagcctttgttcccttttgagttgagactgagttttatctccagaggaagagatgtccctgtactgaactctgttggaaggggttgcagccatgagcagagtgcaaacacgggagggtaaggtgtggaaagtgctttcctggtgtcagagtgggaagacctccccagtcacttaataaaccctttaccaaccatgcgagtgcctgtgtgtcctctttttttttttcttttggctcaataacatatatttaaatatattaagcaaaacattgggaagctatccaaaccaaaggcagtttcatcaaggcttttgtaattcatggcagatttctggaggctttttttttttttaaatatactagaaggctacagttttgtttattttatgtatatgagtacactgtagctttcttcagacacaccagaagaggacatcagattccattacagatggtttgagccaccatgtagttgctgggaattgaactcagaacttctggaacagcaatcagtgctcttaaccactgagccatctctccagcccagctatggatttttgttggttttggtttttttttttttttttttttttttttggaggcaaggtctctacatagtcctggctgctctggaactcagtatgaagattaggctggccttgaactcacaaagatctgcctttcatgtcctgagattaaaggcatgtgccacaccgatttttaataagtaattatttttgtaaccattataaaaagtctgtggcaagtcgggcagtggtggtgcacgcctttaatcccagcacttgggaggcagaggcaggtggatctctgagtttgaggccagcctggtctacagagtgagttccaggacagccagggctatgcagagaaaccctgtctacaaacaaaagtctttagtaatcaagtattattaagttaccttaaaacagtgaactgaggatgcagagataaattgcccccttccaaaacactccgtgaatacaagtttgtccctatggagtgaagtggaatgtagtgagtgtctgcagactggggacaccaaggagaaagcagaccagacaaatttcctcaaacaggagactccaaggtgctgggcagccctgcttcctggaggacctctgaggtgctgcagaggcaaggccagtgactaagggagccagtgactcctgggaacctcagaagcctgagatttgggtctgctgggtgggttcaggtcacacagctaattctatgaattgtatgtgaggaggcagggttctcagcacttctgtctgcactttccagaacactaatactgctcagacctgtccccaagtgacaagaacccattccctttactacaggtgataatagctctgggaaagccagaggtaacatgtgaagtgtggtttctgttaaggtcaggttcagtactcttggttattccatttagaataaaactgggattctaggatgttccttgctctaggagactccattgtgtaaacaactttttaaaaaatgtatgtgagcctgtgtgtacataggggtaccacatgcatacagatgccttcgaaggccagaggaggacatggagcctctgaactggagttggaggttgtgagctacctggtgtgagtgcaggaaactaagttacagtcttctggaaaagcagcaaatacttagaaatgctgagccgtttctcccgttctttacaaacagttttttactccattttgagggagagatggcagcagtttctgatagacctagaagtaccatctgacaggctgagaatagaaagggtgccaccctgtaagtgagttggggagaattaagactgtaggggcatatgtaagtattaaaatcacatcaggaggtagaggcaggtggatctctgaccagcagagctacatggcaagaccctgtctcacagaaattcacgagaaccaggtgcaatactatattggacacattgaccaaggaaagagtgtaactgtcttaccaggtccccataagtgacagcatggtctcatggtctcatggcctattgtctgatacctggagcttcagctagcctcagtccccagctggttacaaggcctacttggctgccgcctgttctgtttacccctctggatctggacttggtcacctgcttcctgctcctgacccatatcctgcttcggacaggtttactctctcacggagcagctgtacttcgcagctttgctcacagacctgattccagcagctccctccaggcactctctggatcatttttccccctgcagtcttccagtcctttttcaatgcctctcaaactctgctgtggtctcaatacatatatatctattctataacccttatatagaatgggtgttttgaataagaagggcccctagagactcgtatatttgaatgcttgatccacagttgctagaactgtttgagaaggactaggaggtgtgacattgttgagggaggtgtcactgagggtgggttttgagttttgaaagcccacaccattcccagtcttgtgtatgtgggttgctgtctctcctctctctgtttgtctctgtgtctttctctgcctctctctctccctccccttctctccctttccagctctctttctccccccccccccccgtgcttgtggatcaaatataagctctcagctactgcttgagtgccatgtttgcctgcctactgccacccttcccaccatgatggtcatggacttgtcctctggaactgtaagcccccaaataaaatgctttctataaatttcctaagtcataaagttttatagcaatagaaaagaaccaaagacaatataaagatatttagatacatttcctgtgttatgtgcgatgtgagcagtaataatatagattattgccatcacttaaacactgaactttgtaaacttattgtcactcaatgaattctgacattgtgttcctgtgtgtctagcctagtgtattcacgtttctgtggtgatctggcctcagaggtgcctgtgagtaacaccccgtctgctttttgttgaattagcctgtttgtgtccccagactcccagaacagcaatgttctcatagtgctggctacactgtctgcctcagaagacgctgtgaggtttcctcaggcagacacagcttccttcagtgcctggacaatcactccaggagtgatccagactgggagagccctctgacaagggacccatgactgacttaactggccctgcttggctcctgctgccctcggggcctcacagcagctggtctccaatccccagaaaaatcatatgaatgcatgctcctatgccttgtgccccacttgtctggacaatgggctgagttcagacaccctttcatagattattcttttgaaacttcttccttccacccagtctttgtgccattcagtcctctgagcaaaatggccaccatcttcctcagatgagctgtgcctgcttgcactagcctgtcagtactggccctctaaactgttaacaagcttcatagagaggcagtggagagggccatcagaccctcacgggagattcctactgctcctttcagccatctggaggcagttctgccctaactatgcatggcctcgggggctcgggagctgctggggtaaataggctgtggaaagtcagctgaacggggctgactttctgtttccggctagcattttctatttttaaataataattattgggaaagacttcaacttggaggtaaccaaaaaaaaaaaaaaatctttaatcttaattatgtatctattttgtgtgcttgtgtgtactgaagctgctccaacctcactactgctgtctctccagggactaatctctgtttggtcatgaaagccacaattaactaatgactgaacactgggtaggctcgaggcttccaaaaaccagattttcagaccttcaattgctgaattgatctcaccttctcatccaacttgtttttcaaacatctttaaaccaataaggctttttcatggcacacaaagcctgcataaagaagtccacagactactgtgtgaatgcctttgatcccagcactcgagagtcagagacaggtgggagctctgtgagttcgaagccaacctggtctactgagctagttccaggacagtgatggctacacacacacacccctcttgtcatgaaaaacaaaacaaaacaacaacaacaaaaaaaaaccaaaacaaccaaagaaagaaagaaaaaagatcggcagacaagttgtgaaaatgctgaatgctatagtcctgtcacaatttgcaaaacttttggtgcttgaatggattgtaccaggagtggagttgccctcttgggagttctgtaagaggaaagtggggctcaattagaagaccccgtattgccaggtggagtggcataaggtacactcctgagctaaggcagaaggatctctgtgagtttaaggccagccagggctatatatagtgggatctagaagagcctggggtaccttgtgagactctatctcaaaacaaaacaaaaccagccttcctggacaaataaacttcaaagcagctccatctgccctactctggaggtgtccttaatgtttttaagatacattttattctaaccctgtaaatgtgcctggtatgtggtatacatgagcgcaaatacctgtaagggccagagacatcagataccctggagctggagttgcaagctgttgcaagccacccaacacaggtgggtgctggaaaacaaactcaggtcctcagggaaaacaacaatcactctttttgtttgtttgttttgtttttgtttttttgagacagggtttctctgtataaccctggctgtcctggaactcactctgtagatcaagctggcctcgaactcagaaatccacctgcctctgcctcccaagtgctgggattaaaggcgtgtgccaccactgcctggccaacaatcactcttaatcactgagccatgttttcagtccctgtactgtctttgaaaagtgttttctatcatttatttgtggggaagaaggggtgatgtgtatgccatagcacacatgtggaggacagaagaaaacttgtgggaggttgctctctctatccaccatgtggggcctgggaattgaattcccaccaccaggcttgatggtagatatcctgccctattgaaccatctcatacacacacacacacacacacacacacacacacagacgcacacacatatgcaggcacatataccacacacacagatacacagacacacttacacaggcacaaacacacacacaaacatacatatacacatactacacagagatatacatacataccacaaacaacatacacacacactgcacagatacatacacacacacacacacacacacacacacacacacacacacgctctctcaattgcactgttctcatttctcacagaattggaggtggaggttacctgtgtgccatagaacacatgtacaggtcagaggacaatttgcaggagttgggtctctgcctctaccctataagtccctaacctgagacttaggtcatcttggtgacaagcacctttaccacctcgcccaccctcccacagcagacttctgtgattaggatataaacttaaaactgactctcttgggctcctgcagggttataacttggacactggtcattgtcgtgtgatactgaagaaactgtagtgtgtggggctcacatacctgtctcgaaaaaacaaaaacaaaacaaaaaaaccaagacttagcaaaaaaagtgttattttgttgttgttgctgctgttctttacatttctttctttcttttgtttttgtttttgtagacagggtttctctgtatagccctggctgtcctggaactcactctgtagaccaggctggcctcgaactcagaaatccgcctgcctctgcctcccaagtgctgggattaaaggcatatgccaccaccgcccagccctttttacatttcttcacaggaatggtggctaatgccagccacctaggattatcagcagaaggcagaaagatcaaaaggttggtgagtcagtctaatatatatcaataactggtaccttctgtccacatttcataaaataatttcattcaaactctacacaaaatttttgaccagcggcttgccctcgtggtttttgagagacatcaccattgtgttgcttaaactccaggccttggggatctttgtccctgaacatactgagctctaggcctcacattaggatgactggccttctcattttacccagtaggtgggtattatcttcattcaatgtattgcttttaaaagtacttggagctggagcttggagctcagtggataagagctcattcagcttgctattccagaggactcaagttcagttccctgcacccatgctgggcagctcacaatctcctgtaattccaactccaaggagacctgaaacctcttttttttttttttttttttttggtttttttcgagacaggatttctctgtatagccctggctgtcctggagttcactttgtagaccacactggcctcgaactcagaaatctgcctgcctctgcctcccgagtgctgggattaaaggcgtgcgccaccacgcccggctgacctgaaacctcttgcctccatgggcacctttacccatctgcacagtctcacagaaatataaacacaattaaaagtaataaaaatagccaggcagtggtgatctgcatgcttttaatcccagcactcaggaggcagaggcaagtagatctctgagttcaaagccatcctggtctacagagctagttctagtacagcaacagctccacagagaaaccctgtcttgaaaaaacaaagccaacaatgacaaaaaagaaatatgtcctgggctggagagacggctcagtggtaaccatgtaaacagctcatagtcacatgtaacatcaggtccaggggatgatgccctcttctggcccccacaagtactgaaagcaactggtgcacataaattcacacacacacacacacacacacaactagatacataggtattttaaaagtagttctttaaaaatgattcttttggcttctgatgactcttgggattgtacagtctagaccccagagcagtgcttaagtctttccattgctttaaaaaccaactctttcaagggcctttgtgaacatcacagaccagcagaggttggaacaatttcagaagaatgtgtcattcccaaacagaacactgttgtccaaaacaagtaactgaagggccttgtatggctggacagaaatggggagagagaactggattttcattcttttctgaagagtaatttagagattaaaaattgcaaggccgaggagattgtagttttgtctagcatggacaggccctaagtttcctcttcagtattggagacaaacaaaataccacaaaatggtcagcacaagtggctgtacctggggtttccccagtgtatttgaagtaaactccaatatttttgagacagagatttctctgtgtagttctggttgtcctggaactcgctctgtagaccaagctggacttaattcatagagatctgcctgcctctgcctccagagtgctgggattaaaggtgtgtgccactactacctgggataagctccaagttgaactgctggattagaagaaaatatgggtgttagaattattcaaacttttagtccaggctcctggcagacatgactttttaacagctgtgccttcctactttctgaactgggataagtgatatctctatctcagggttttttttttttttccaatttttattaggtatttagctcatttacatttccaannnnnnnnnnnnnnnnnnnnnnnnnnnnnnnnnnnnnnnnnnnnnnnnnnnnnnnnnnnnnnnnnnnnnnnnnnnnnnnnnnnnnnnnnnnnnnnnnnnnnnnnnnnnnnnnnnnnnnnnnnnnnnnnnnnnnnnnnnnnnnnnnnnnnnnnnnnnnnnnnnnnnnnnnnnnnnnnnnnnnnnnnnnnnnnnnnnnnnnnnnnnnnnnnnnnnnnnnnnnnnnnnnnnnnnnnnnnnnnnnnnnnnnnnnnnnnnnnnnnnnnnnnnnnnnnnnnnnnnnnnnnnnnnnnnnnnnnnnnnnnnnnnnnnnnnnnnnnnnnnnnnnnnnnnnnnnnnnnnnnnnnnnnnnnnnnnnnnnnnnnnnnnnnnnnnnnnnnnnnnnnnnnnnnnnnnnnnnnnnnnnnnnnnnnnnnnnnnnnnnnnnnnnnnnnnnnnnnnnnnnnnnnnnnnnnnnnnnnnnnnnnnnnnnnnnnnnnnnnnnnnnnnnnnnnnnnnnnnnnnnnnnnnnnnnnnnnnnnnnnnnnnnnnnnnnnnnnnnnnnnnnnnnnnnnnnnnnnnnnnnnnnnnnnnnnnnnnnnnnnnnnnnnnnnnnnnnnnnnnnnnnnnnnnnnnnnnnnnnnnnnnnnnnnnnnnnnnnnnnaatttcataaattcattctttttaatagctgagtagtactccattgtgtagatgtaccacattttctgtatccattcctctgttgaggggcatctgggttctttccagcttctggctattataaataaggctgctatgaacatagtggagcatgtgtccttcttacccgttggggcatcttctggatatatgcccaggagaggtattgcgggttcttccggtagtactatgtccaattttctgaggaaccgccagactgatttccagagtggttgtacaagcctgtaatcccaccaacaatggaggagtgttcctctttctccacatccacgccagcatctgctgtcacctgaatttttgatcttagccattctgactggtgtgaggtggaatctcagggttgttttgatttgtatttccctgatgattaaggatgttgaacattttttcaggtgcttctctgccattcggtattcctcaggtgagaattctttgttcagttctgagccccattttttaatggggttatttgattttctgaagtccaccttcttgagttctttatatatgttggatattagtcccctatctgatttaggataggtaaagatcctttcccaatctgttggtggtctttttgtcttactgacggtgtcttttgccttgcagaaactttggagtttcattaggtcccatttgtcaattctcgatcttacagtacaagccattgctgttctgttcaggaatttttcccctgtgcccatatcttcaaggcttttccccactttctcctctataagtttcagtgtctctggttttatgtgaagttccttgatccacttagatttgaccttagtacaaggagataagtatggatcgattcgcattcttctacatgataacaaccagttgtgccagcaccaattgttgaaaatgctgtctttcttccactggatggttttagctcccttgtcgaagatcaagtgaccataggtgtgtgggttcatttctgggtcttcaattctattccattggtctacttgtctgtctctataccagtaccatgcagtttttatcacaattgctctgtagtaaagctttaggtcaggcatggtgattccaccagaggttcttttatccttgagaagactttttgctatcctaggttttttgttattccagatgaatttgcaaattgctccttctaattcattgaagaattgagttggaattttgatggggattgcattgaatctgtagattgcttttggcaagatagccatttttacaatgttgatcctgccaatccatgannnnnnnnnnnnnnnnnnnnnnnnnnnnnnnnnnnnnnnnnnnnnnnnnnnnnnnnnnnnnnnnnnnnnnnnnnnnnnnnnnnnnnnnnnnnnnnnnnnnnnnnnnnnnnnnnnnnnnnnnnnnnnnnnnnnnnnnnnnnnnnnnnnnnnnnnnnnnnnnnnnnnnnnnnnnnnnnnnnnnnnnnnnnnnnnnnnnnnnnnnnnnnnnnnnnnnnnnnnnnnnnnnnnnnnnnnnnnnnnnnnnnnnnnnnnnnnnnnnnnnnnnnnnnnnnnnnnnnnnnnnnnnnnnnnnnnnnnnnnnnnnnnnnnnnnnnn

SEQ ID NO: 508 - DNA, 4175 bp, Mus musculus
ggagaagctggtctccggcagctccgctgggtgtgaggtgtggtaacctctgtaaggctggaagccgggactgcgatctgccgagcggcggggtgagaagcgcctgctttcagagctcaccatgtcgcggggctccatcgagattcccctccgggatactgacgaggtcattgaacttgacttcgatcagttaccggagggagacgaagtcatcagcattctgaagcaggagcacacacaactgcacatatggattgccttggcgctggaatactacaagcaagggaaaacagaagagtttgtgaagctgctggaggcagcacggatagatggcaatttggactatcgagatcacgagaaagaccagatgacttgcttggatacattggcagcctactatgtacaacaggctcggaaagaaaagaacaaggacaataagaaggaccttattacgcaggcaactttgttatatacaatggctgataaaattattatgtatgatcagaaccatttgttgggaagagcctgcttctgtctgctcgagggcgacaaaatggaccaagctgacgcacagtttcactttgtacttaaccagtctccaaacaatattccagcccttcttgggaaagcttgtatttcattcaacaagaaggattacagaggagctctggcttactataaaaaagcattgcgcactaacccgggatgtccagctgaagttcgtttaggaatgggccattgctttgtcaaacttaacaaactggaaaaagctcgactggcattcagcagagccctggaactcaactcgaagtgtgtgggagcactggttggactggctgttctagaactcaacaataaagaggctgattccatcaaaaatggcgtgcagcttctttccagagcctatactattgatcctagcaacccgatggtactgaaccatttggcaaaccactttttcttcaagaaggattatagtaaagtgcagcacctggctctccacgcattccacaacaccgaggtggaggctatgcaagcagaaagctgttaccagctggctcggtccttccatgttcaggaagattatgaccaagcctttcagtactactatcaagccacacagtttgcttcatcttcctttgtcctaccattttttggtttgggacaaatgtatatttatcgaggtgacaaagagaatgcatctcagtgctttgagaaagttttgaaagcttatccgaacaattatgaaactatgaaaattcttggctctctctatgctgcttcagaagatcaggagaaacgagacatagccaagggccatttgaagaaggtcacagaacagtatcctgatgacgtggaagcttggattgagttggcccagatcttagaacagactgacatacagggtgccctttcagcttatggaacagccacacgcatcctgcaggagaaagtgcaggccgatgtccctcccgagattttgaataatgttggggccctccattttagactcggaaacctgggggaagcaaagaaatacttcctggcctcactggaccgcgcaaaggcagaggccgagcatgatgaacactactacaatgccatctctgtcaccacatcctacaatttagccaggctctatgaggccatgtgtgaatttcacgaagcagagaaactgtacaaaaacattttacgagagcatcctaactacgttgattgctatctacgcctaggagccatggccagagataaaggaaacttctatgaagcttcagactggtttaaggaagcccttcagatcaatcaggatcatccggatgcctggtctttgattggtaacctccatctggcaaaacaagaatggggcccaggtcagaagaagtttgagaggatattaaaacagccagccacacagagtgacacctactctatgctggcccttggcaatgtgtggctccagactttgcatcagccaacccgagaccgagaaaaggaaaagcgccatcaagaccgtgccctggccatctacaaacaagtcctcagaaatgatgccaagaacctgtatgctgccaatggcataggagctgtcttggcccacaaaggatacttccgtgaagctcgtgatgttttcgcccaagtgagagaagcaacagcagatatcagtgatgtgtggttgaacctagcacacatctacgtggagcagaagcagtatatcagcgccgttcagatgtatgagaactgcctcagaaagttctataagcaccaaaacactgaggttgtgctctacctggcccgcgccctcttcaagtgcggcaagctgcaggagtgcaagcagactctgctgaaggccagacacgtggcacccagtgacacagttctgatgtttaatgtggccttggtcttgcaaagattagctacctctgtcctgaaagatgaaaaaagtaatctgaaggaagtccttaatgctgtgaaagagctggagctcgcacacaggtacttcagttacttgagcaaagttggagataaaatgagatttgatttggcccttgctgcctctgaagccaggcagtgctctgacttactgagccaggcccagtaccatgtggcccgggcacgcaagcaggatgaggaagaacgggagctgcgggccaagcaggagcaggaaaaggagctcttaagacagaagcttctcaaagagcaggaagagaaacgtctcagagaaaaggaagaacaaaagaaacttttggaacagcgtgcccagtatgtggagaagaccaaaaatatccttatgttcactggcgagactgaagcaacaaaggagaagaaaagaggtggaggtggagggcggcgttccaagaaaggaggcgagtttgatgaatttgtcaacgatgacaccgacgatgacctccctgtatccaaaaagaagaagagaaggaagggcagtggcagtgaacaggaaggcgaagaagaggaaggtggagagaggaagaagaagaggaggagaagacctccaaagggagaagagggatctgaggaggaggagacagaaaatggccccaaaccaaagaagcgccgcccaccgagagcagagaaaaagaaggctcccaagccagaacgcctgcctccttcaatgaagggaaaaataaaatccaaagccattatatcatcaagtgatgattcttcagatgaggataaactgaaaattgctgatgaaggacatcccaggaatagcaacagcgattctgatgacgacgagaggcccaacagacgcgcctcatctgagagcgactcagatgacaaccagaacaagtctggcagcgaggcaggcagccctcggaggtcgggtagacaggagtcggatgaggattccgacagtgaccagccgtccagaaagagaaggcgctccggctctgagcagtcggacaatgagtctgtgcagtcagggagaagcccctccggagcttctgagaacgagaacgattctcgcccggcttctccaagtgcagaatcggaccacgaatcagagcagggctctgacaacgagggctctggccaaggctctggaaatgaatcagaaccagagggctcaaacaacgaggcctcagaccgaggctcagaacatgggtcagatgatagcgactaggtttatttcatcaaagactccatgggttgggaggagctttataatatataaaagctgtgataagaaacctttcaggtggttagtcacttgtaaactttttcttaaggcaattttttttctacttgtatatttactaacttccaagagacatttcctgtgctggagagtccagtgtcccaagctggagcagtgagactcctgcattgtggtgcagctccacctgccatatgtgaaaactgcagtgataacacagatgctaaagcattcccaaggcttgcaagccaggctagcccctcccctctcctctcctctcctctcctctcctgcagcatgctgctatgtacaaacttgtaccaaatgttgcagaagcagagataaaagcctttgttcccttttgagttgagactgagttttatctccagaggaagagatgtccctgtactgaactctgttggaaggggttgcagccatgagcagagtgcaaacacgggagggtaaggtgtggaaagtgctttcctggtgtcagagtggg

SEQ ID NO: 509 - protein, 1181 aa, Mus musculus
GWKPGLRSAERRGEKRLLSELTMSRGSIEIPLRDTDEVIELDFDQLPEGDEVISILKQEHTQLHIWIALEYYKQGKTEEFVKLLEAARIDGNLDYRDHEKDQMTCLDTLAAYYVQQARKEKNKDNKKDLITQATLLYTMADKIIMYDQNHLLGRACFCLLEGDKMDQADAQFHFVLNQSPNNIPALLGKACISFNKKDYRGAYYKKALRTNPGCPAEVRLGMGHCFVKLNKLEKARLAFSRALELNSKCVGALVGLAVLELNNKEADSIKNGVQLLSRAYTIDPSNPMVLNHLANHFFFKKDYSKVQHLALHAFHNTEVEAMQAESCYQLARSFHVQEDYDQAFQYYYQATQFASSSFVLPFFGLGQMYIYRGDKENASQCFEKVLKAYPNNYETMKILGSLYAASEDQEKRDIAKGHLKKVTEQYPDDVEAWIELAQIQTDIQGALSAYGTATRILQEKVQADVPPEILNNVGALHFRLGNLGEAKKYFLASLDRAKAEAEHDEHYYNAISVTTSYNLARLYEAMCEFHEAEKLYKNILREHPNYVDCYLRLGAMARDKGNFYEASDWFKEALQINQDHPDAWSLIGNLHLAKQEWGPGQKKFERILKQPATQSDTYSMLALGNVWLQTLHQPTRDREKEKRHQDRAIYKQVLRNDAKNLYAANGIGAVLAHKGYFREARDVFAQVREATADISDVWLNLAHIYVEQKQYISAVQMYENCLRKFYKHQNTEVVLYLARALFKCGKLQECKQTLLKARHVAPSDTVLMFNVVLQRLATSVLKDEKSNLKEVLNAVKELELAHRYFSYLSKVGDKMRFDLAASEARQCSDLLSQAQYHVARARKQDEEERELRAKQEQEKELLRQKLLKEQEEKRLREKEEQKKLLEQRAQYVEKTKNILMFTGETEATKEKKRGGGGGRRSKKGGEFDEFVNDDTDDDLPVSKKKKRRKGSGSEQEGEEEEGGERKKKRRRRPPKGEEGSEEEETENGPKPKKRRPPRAEKKKAPKPERLPPSMKGKIKSKAIISSSDDSSDEDKLKIADEGHPRNSNSDSDDDERPNRRASSESDSDDNQNKSGSEAGSPRRSGRQESDEDSDSDQPSRKRRRSGSEQSDNESVQSGRSPSGASENENDSRPDSAESDHESEQGSDNEGSGQGSGNESEPEGSNNEASDRGSEHGSDDSD

SEQ ID NO: 510 - DNA, 48509 bp, Homo sapiens
  misc_feature (1)...(48509): n = A,T,C or G
aaataagtgtacaacaaactcctgtaacacgagtttacctatgtaacaaatctgcacaggtacccatgaacctaaaagttaaaattaaaaaaacaaaaaaataaaaaaacctttccctgtttgacctaccatgtgcctccatttctttatctgtaaaatgcggactataacagtacccacatcacaggactcttgtgaggattaaattagttaatatatatataaagcatttagaagagttcctgacacatcataagtactgtataaatgatgttgtgtgaggaaaggccaaggggaataaaaacagtctagaggttgggtgctgtagttcatgcctgtaatcccagcactttgggcagctgaggcaggtggatcacctgaggtcaggagtttgagatcagcctggccaataaggtgaaaccctgtctctactaaaaatataaaaattagctaggcatggtggcacacacctgtagtcccagctacgtgggagggtgaggcaaaagaatcacttgaacccaggaggcggaggttgcagtgagctgagattgcaccactgcactccagcctgggtgatggagtgagactctgtctcaaaaaaaaaaaaaaaaaagcagtccagagtctggtggaatgagtaccattttcaaacatctgaaggactgtcatgtacaagacccttttacagaaaactaacagaagtggaggcttggctcttcataaagaatcggaaatggtttgagctgccctagagtgaccaaacattcccagtgtgcccaggactgtcccggtattaaaactgaaagtgccatctcggaaaactgctaggacccaggcagatggggccaacagatggttggtcactctagctgtcccccagcaagatgtccttcatgaagcagagagtacctgtagctgatggatctgagcagaagctgaggaatcgtggttcagggttggtagagcagctttccctgcatgaggaaggaactgggactggataagatttaatccagataaagcgcatttttatggaaacaacttggatctgtagagagaaaaaaccccacttcaaattctgtctctgccacttactagctttgtgatcttggataacttaactttctgagcttcagttccttgatccataaaataggaataatcattcccaacttgtaaggctattgtatggattagacataatgtatggggggtgacttgcacagtgcctggcgcaatgtaagcatccaagaagttataacttctccctccaaggtccaactctaggattctaatcgccaggttctctaagccgtggttctcaaaccagcagcatgggcagcacctgggtactcattagaagtgcaaattatccactccaccccatacctactgaatcagaaactgtgagcggggcccagaaatctcagtttgagtcggctctccaggtgatccttgttacccaaacatttgagaagcactgcctgaagggactgtcctatcgctgaaatcaaaaacatgggaagtctctccaaaacttgaaaagctctccctttattccactgtaaaataaagttattttaaaatgctattaccactggaacataattttttcaaataaaacaaaaggaattaaaaatagtgctgatcccaatgcctttttttccttttttaaattgcctttgtaaataggcttcacatgcgccagctgtctgcactctggcgtagataagtcagtatgacctggctttgacacatcctcagatcaacagcactgataagttgactaagtttggttacgctgtgttagccactaatgtggccaaccataaactacacagtcaaatttattttccacactaactgagggagcaagtgggtaggacatttgggaaagaatttcttaaatggtttagcatacttctttaggcataaaagcaccccaggggtaagtaaaaagaattctcattggagtgcaggttaatttttttctctgccctgacaggtcccagaacacagtatgtttataacacacataaagatagagaaagaggaaaataatattttaaaacagttctaaacccattttataaagatcttttaatatacaaaatccaagatcattcggtcaaaatgacccatctattttttaatttgaaatatttcttacaacttttaggaatgaatgtgaagaataatctcttcaaggtcctgaaaatatcttcaaaatatttacttaacactgaggcataaagtttcatctacacaaagcagtaacgtgcaaagtctgtgtgtacatttgtagggtaaatgcacctgtagcaataacttaagcataccttagaatgactttgtatggtagatacacctgaaatgtgtgtgtttccgagctaggcaatccgtgtgtgaccaacctggagagtctttccttgtcaatgaggaacatctgagcccctggcccaaccagtggaacacaggctgtacgggagattgaggccctgagttctgtgttaaatgaaggttgccagatggaggttgttagcaggaaagtgttaagtgaaaatgctgtataaactgcatgctgtttgcaagcagttgtggttttcctgcccagcccgctgcctccgctaggtcatgtggttatgcggtccatcccgccgctggaccgcttctgtaggtgaggcgggtctcctgcccagcccaccgccactagactctctcccctgtatgtgagcccctaataaaacctcatgtctcctttgctggctctgggtctcttctttggcctcttgaacctggtgctttccctattgaggttaataggggttccacacaacatttgcttttagaaacaaagttctttactatgtttccatttttttatacacaagaaaactcaaaatttatgtaatgagcatttccagcatccttaccctgggagagggggtgtttggaaagtatctcttcaagaaggacagaggcagagggaagacaagactacatacacaacaatgtattttaaagagaaaaggataaatatcctgtgatatactgttctccgaagctgaatatagttcaatgccaagctatctttggagatgataagaaaaatataaaggcgagagtcccttgtggaaggatgataacaaggaagacttcctggagatggaacacacaacggatgtcagataatcagtaaattttaatgttatgacttgtgctcttgttgctagccttaaagagtgttcttgtcaagattttgctcatgataccctttctgcataaaacatccttcccacaattctgcttattcaaatcctacccatctttcaaggcctacctgaagttctatcttctttccttccttccttcaataaggatcaataataaagtccttcaggagggaggggctgggtgtaatggctcacacctgtaatcccagcactttgggaggccaaggcaagagtttttcttgaaatcaggagttcgaggccagccagggcaacatagtaagaccctgtctctaccaaatatgtatatatatatatacacacaagaagggagagatcatgtgcttcttgtcattggggacaagaaagagaggacgagaagagttggagagtctgtgttccacctgaagtgagaaaactccaagggatagagtagtgactgcttccaaagcagtgactgcatctaaagcaatgacacatacacattgacctaacacctgacaccccgtcttattttctacaccaatcctcagagacaaatatgactaccccaccccaacctcactcccacccttgtcgtctacactattgacagattactgtgcccctgttatagggttgttctgaggattaaatgagtttctgtatgtaaaattctgacacaagtaaatattcaatacctgttaggtgtattaagtgtagatgttaactttctgtttaattactactaggggaagtaaaatcaatcaaaaaagtaatttgctcaggcatcccaaagatatgacatacttagggataatttccatgctaatctcttgccttggggattcacagaccaagtagacaatgttaaacaccaaacccatctgagatacagacctgtggttataagtgcttaggagagactattcccccattgcaccatctataccttttacacccagaacatctgtgttggtgggatttttttttagttcccccacttttacttagggtgtaatcttttaagggttccaatgtgggcccaaagcctctaatcctgtttctgtgtgaacattaagacacaattcactggaatatatcagccaccactacctgggtagtcttagcatgggcttaaatgcctgttcttcagattattagatagctcagctattcatttatgaggacatttactgtgtgtgtgtgtgtgtgtgtgtgtgtgtgtgtgtgttttcagacctgcaaatctaggtgtttttagcaggagggttttctggttattcaaatctgccagaactaagatttctatcagagtgttttactgacagtcaaattaggtgtgttgacctttattcccagttcttacctaaaggagcattttatgtaattttaaattcctgaaactatagtgatgttttggagatgaatatttattgaaaccccagaggaaactatgacacagagtattctaagacaactgcccaggcaactgtaatgataaattataaccctaaaacttttgcctaatgatgatttatcctaatatttcataaacaagccttattttaataattaatggggaaaagtataatttaaaaattcagctgcaacaacaggggatactcagccataaaaaggaatgaaataatggcattcacagcaacgtggatggagttagagaccattattctaagtgaagtaactcaggaatggaaaaccaaacgtcatatgttctcacttataagtgggagctaagctatgaggacacaaaggcctaagaatgatatgatgggctttggggactcgggggtgggagtagggtggaggggtgagagacaaaagactacacattgggtacagtgtacactgcttgggtgacagttgcaccaaaatctccagaatcaacactaaaaaatttatccacataacaaaaaacacctgttcccccaaaactattgaactttttttaaaaaggaaaataataaaaataattcagctgcagagatgtgtcctgctgataggcctctgctacaggccgtactgtgttcccctcaaaattcatttatggaagtcctaactcccagtacctcagaatgtgactatatttagagacaggatctttagagaggtcattaaattaaaataaagtcattagggtgagccctaattcaatgactgaagtttttataggaagaggagattaggatttaaactcagagagagtgaagaacatgggaagccacagagagaagacggccatatacgagccagggaaagaggcctcaggagaaaccaaacctgccaatgccttggactctcacttccagcctacagaattgtcagaaaatacatttctattgtttaagtcatccagtctgtgtactttgttatgggagccctagccccagcaaactaacatagcttcgtattgtttcttaataatttatacaaactacttaaaacacttaaaacacttcaatttgtgtcctgctatttaaaagatatctaacttaagatctaaaatattatttaggttgagcgtggtggctcatgcctgtaattccagcactttgggaggcagaggctggaggatcacctgagcccagggaggtcaagcctgcaatgagtcatgaccacatcactgccctccagcctgggtgacagagtgagaccctgtctaaaaaaaatatatatatataatatattatatatttatataattaattatatttatataattatatatttatatagtatattatatatttatataattatatataatatatattatatatttatataattatatataatattttatatattatatataatatatttatatatttatataatatatattatatattatatataatatatattatataaaatatatttatattatatataaaatataatatttatattatatataatatatatataatatatacacacataattatatataacaaattatatgtatatttaatttgttaagatcaactttcttcactcctttttaataattagcatatttcgccagatgtggtagtgtctgcttataatcccagctgcttgggaggctgaagcaggaaattgcttgagcccaggagtttgaggctgcaatgagctgtgatggtgccaccgtactccatcctgcatgacagagtgagaccctgcctcaaaaataataaattaattattagcatattttatcaacatataaaataacttactcttcagattggctaaatgtatatatttaccaacattacagacaactgcaataccaacaacataaaactaagaatcttaacaatctatttagaacatgtactcaacaaaacccacactggccaaatacactaactgctttgccttgatctggtgcactcaggcccaacatggggcatggtgttttgtgaatggacattatgcaatcatgccagttgaaataaaatctttgaaattgctccaaaactggttctacagctttaaaacatctaatttcatcagtgcctgctacatttagggaaaaacaaaaggctgcttgtagcaacctggtaccaagagtgtagtttaagtctcaattgttgccaggcccctgataggtgattctctcttcattgtccttgctgattccttgcaggccaccttcctcttcacaccctctgtgtgctagaattcctcaggctgggaactaggcccttctcttgtcactctccattctctccctaggttatctaatctaatttaatcccatagttttaaaattcatctttatgccaatagctctcagacttatttctccaggttagaaactgtcttctaaattacagatctgtaatttagactatctgaaatctgcatctggctgtcgcagagacagtacaaactacaaacaacacatgtgaaatccaactagtggtctacccttgcccaaatgtgctcctccactaatctttcctattttaggaaatgacacatcattcacccagttgttcatgccagaaactggacgtccttcttgacactactttttcagtgaccccggcctatatccaatacattggcaagtcctagtgactaaggtatcaacagatgattgatagacagatagatagatgataatcttaaatccatccacttctctccacctccactgtcttaaacctattcctatttatcatctgtgacctagacagcagtttcctaagtggtctgcccacatcctctcgagacactttccaatccatctttcacaacatagccagaacaatcttttaaaaccaattcttttttttttttttcagacagagtctcactctgtcgcccaggctggagtgcaccggcatgatcttggctcactgcaaccttcacctccgcctctggggctcaagtgattctcatgcctcagcctcctgagtagctgggataacaggcgtgcaccaccacacccagctaatttttgtatctttagtagagacaaatttcaccatgttgcccagactggtcttgaattcttaaactcatgtgataggccacctcggccacccaaagtactgggattacaggcatgagccaccgtgcctggccaaaaccaattctcttttattctttctccctctcattgacacatacacatcacttaaagcatttcaatcactttgcatgtaagataaaaccccaaatcattaatatatactaagtcaaaagaaattctgaaggacaaaagcatttagaaaaaaagtttacttacaaaaacacttgcaaaagtatacaggtgaatttacgctttagaaggactgatacatcaaatgaacacacaccaaggtttacagttagttgcttcatggtgagaaaagagcaattttctcatatgattgccatatgaccccaagctcccacatatcttcagactgtagcagtacaaaagtcagcaattaaactgtaagagagtcagtaatatatgggaaatgctgaaagttttgttcactttggagactacagagtgtgatactgttgtttcacggtttatttcagaacacaaagtattttgtttttcctgtgggaagtaatatgtacactcactcattttggaaacaggacaagatgtcagttttgctttataagcataaagcccagcatgtctgggtacttcttatatcagcttcaactcatgccactctccccctcattttctacattctagtcacatgaccttcttgcaggttctcaaagctcttccccaacatgccgtcccctctgtctggtacacattcccctacatactttacctgccaaaccttactcattttcccagatgcaacttaaatgtcacttcctccaaatcccactctaaactgagtgccccaactattcaatcatagcactctgcattatcaggtatgatgcctttggatgcgaataactgaaaaaccaaacctatcaatagagtttttaatatcagggaggcttttgggcatggagaataacaatcaccactatgtgtacttttgtttaatgcttactttataaactttaaaatatattaaacagtatttctgggaaatactgtctgatgccatccaatgcagtattcactaaccacatgtggctattgaacacttgaaatatgactaatccaattaaggaatttaattaggaatttttttaatttaaattttggaaaaactaaagtgtgtgaacctattttttcaactgcaaactttataaaatctaaacacagatccaatatttccaattaaaatcaggcaactgagatcagtgtatgcatgtgaaatacatatcgaattttcaagactcagtataaaaaaatgtaaaaattatctgaatttttatattgactacatgttgaaatgagattttggatatattacgttaaataaaatatattactaaaattaatttcctcttttttttttttttgaggtggagtctcgatcgatccccagtctggagcgcagtggctgatctcggctcagcgcaacctccgtctcccgggttcaagcgagtctcctgtttcagtctccctggtagctgggattacaggcgcccaccaccgcgccgggctaatttttgtatttttagtatagacgggttttcaccatgttggtcaggctggtctcgaactcctgacctcagatgatccgcccgccttggcctcccaaagtgctgggattacaggcgtgagccaccgcgcctggcctcatctgcaattttacttaaatcacaaatatactagatcttcttacatgcttcgaagaactaaaaaaaataagacatgaattatcacaatgattaccgaattaattgtaaatttttttatttaaactagtcacaaaggtatcacaggtatgacttacacctaacgggggccaaaagatgggttgcgaaacgaatgactgaattatccctaacaatcttgggaagaaaacaggattggccaggcccatcccgagaggtccacgtcaggcaggggccccgcccaccgcgggaccaagcggctacgccttccaagttttcattcggggccgcgccagcgctgaggagagtcagacgccagatggttccgaaggtcctgcaggctctcggggcaccctacagccgacacgccaacaaaagcttcggagccgccaaccccaaaacggaaacaccggagccacaagctgagctcgcgtagggcacgctcccccgggagtgcttccgggacagggggcggggtcgccggaagtggccgtccgccgtccgctgctcgttgtttaagcggctgacgggaaggagaagccagagctccagcggcgccgcggggcggcagtcaagaccagagccggagccgtcactcacctctggattagcctgaagcggagactaccggctgcggagcggcggggcgagacacttgctcgccttttgaccccatcatgtcgcggggctccatcgagattcccctccgggacactgacgaggtaagtgtcgtgtatggaggcgggtgggggccatgaacttgtacgatcgcccccaccgacttcgctcgacttcgtttctgaagcgagagcatcctccttccctaagagccctgatcgaaatacctggccaaggtctgatcatcatcttcttcagcccctgtgccctctcaggctgggggcaccgcgtctctgcagcctcagggccactcggagaaggagttcttgaaagttcctctccagcctgttcgaatttgacagtgcgctactcttttcctaaccaacccacgggagcagaggtgtgagagtacccgataaactgtaaaacacctcgcagattacagaggtgggcgctgatgtttccggggtttatatgcttgctgctcaaactcgagatctttccctgggaatatataggaggtcgcctcttctcccttagaaactcgagtctgtcatggtgcgctgtgttctctacaccaactctccttcaacgagatatcccaagatttagccgcccctgtgtgctgataaaatttaacctcctctcgcttacctatgtctcattcatgggtggcctgtggcttgtctgagtaaagctctcagctttgatgttcagtcttcttgtatatcttttatttttattttttttgtttgagatataatattgaggtataaaattcagtggtttttagtgtattcgcaaagttgtatagtcattacctctaattccaggacattttcctattattatttttgtgcttacagtcaggactgtctgttacacgcaggtgccacctccatgattaatgtgtgcagtggcattcaactttgcatggcttgtagggtcatgcatctcaaggagtcagacctatggcataatagtctctagggtgcttatctgcactttacttggattctatgttaagtaggattttgttttgttattttttagtaagcagaccatttctagtattttatagttccagtgatttggggacaagtagcagggtttgtttgcttctctgtgctttaactttattatagtataacctattcgtcatgtgctccttaaacattaacatggattagctcaaccgtattgaaagtgaacacgtactctatgtatatgcatgttgattatattcacgaaaagcagcaaagatgaaatgtgaattttaaagtggaataagagttaagacctaccttttgtattttaggtcattgaacttgacttcgatcagttaccggagggagatgaagttatcagtattctgaaacaggaacacacacaactgcacatatggattgctttggcggtcagtattcatgtagcaaatattttttatttgttgactaggaaaatatgtagtttctgttttcagatatagtaatagccagcttggctgcatggtagattagttataccatgtgtatggaagttaattgtgttaataatttatggaacaataaggccgttttcctaaatgatatgctgctctactggtgaattagtatatgttggtaaaggcaaaattcatttaagtagtactctatattgaatattttattatttagtgcttgttcagtgaaggctggcttatggtttatagataagctgaaaagaagcgaagtgcttctgtgtgaacattgctgcttaacattgtttcctataacaacaaaacacttcccttaaaatattctagaatgtgattaggttctgggaaaatcacttcacccaaaatcacaaaagttcttttgggtgaagtttatctcagacttatgttttttgtcctatttagtctccttcaatgtgaatcttactggagattctcaagaaaatccaatcagaaaccctaaaattctatatcctctacttgccagcatcagctgcataatgatgttttctttttataggaataggtaatataaatgttacagtcattattcctaagtagatatgccacattgctttcatacaaacatacagaagaggctcctaatattgtcttgaagagtcagagaaataggtctggaattgggcttatatccagtgctcaagactgctctaagagtttcttccttttagatgtggatttacagagaagtattttcagtgacaagcagtgccttcttgacttgaagtgccaacttttcttattccatggagaccaagcctccttgtcacacacattttttttaaaaccagatggtaatttagatgtatatataatatatattatatatatatatatttttaagtacatatgccctccttaacagcacttaaacaaaaattagaatattggaggattagcatggcacctgtagtagaataaattaatgacacattgtgggatatagatttttacagggaaaagaatgtaggctttggggttagatcaagtcccggcatggctgctaactagctatgtgaccttagacaaatgatctaacttctgagcatatgtcctcatttaaaatatagagatgttagcatctacctcatagagtggttgtacagattagagaatatgtgtatgaaattcctttcatggtatgtgaccaatagtcagtggttaataagtggtggatattccacatagagacagagtctctctattttgcccaggctagactcaaactcctgggctcaagccatcctgccactacagcatcccaagtagtagattacaggtacataccaccacacctagtggatatttcttttattatttataagtcaaacagatgcctagagaagttgttaaacaggcccaaatcacagataatttttggtagatctagaaccagaacccaagttttctatttagaattcttcatatctttcactattgttttctctcttaggctctacttatctgaaaattttagttagaaatcaactagataagcagcagattgggaacattgtgaatgattccagttttttaaacagttttattaaagtctaatggatttataataaactgcacatatttgacatttaccatttgataagttttatcatctgtatatacctgtgaaaccatcaccacaatcaagattaatgaatacattcatcaccttctgaaagtgtcctctgtaccactccccacaagtcccccaccccacccctaatccctgtgccagacaaccactggtctgctttttgacactagagattgttttacattttctagagttttatataaatggaatcacacaatatgtactctttttttggtctgatttctttcattcagcataattattttgagatttatccatgttgtagcatgtatcagtagttcattccttttcattgtaggatagtatccattttatggatacaccacagcttgtttatccattcacctgttaatcaacattttgattgtttccagttttttgttattacaaataaagctgctgtaaacatttgtgtacaactttttatatggacatatgctttagtgattctaatttgtttcattaccttatagctggaatactacaagcaaggaaaaacagaagagtttgtaaaattgttggaagcagcacgtatagatggcaatttggactatagagaccatgaaaaagaccagatgacttgcttggatacattggcagcgtattatgtacaacaggctcggaaagaaaagaataaggacaataaaaaggatcttattacacaggccaccttgttgtatacaatggccgataaaattattatgtatgatcaggtaaaaataaagtcaaatttctttccatttatgaagggagaaaagcacatgaaagcaaaatgtgtgtgatagcagattttttgaaagagtttttcttcaagtaacatggttgatagagtcaaaaagaagaaaggttcctcattaaaatcggaatgctttggtttttgtactgtttaagtaatatggacaaatgtagtacataaaacttgctccagtaattttattatctccaggtgaatttcaaggatattttaaggaatttaaatttttcttttggttgttgttactggcacagaagacttacatttcaggataatttcttattttgtaattaagaattgcttgttagtagcttaagcacgttacatttgataggggaatttgcactgtgctccacctccttcctatttggttttcactttagtgttacatgttcatggtatataggggtaaaatctaagataatacattacttcatagaaccatttgttgggaagagcctgcttctgcctacttgagggtgacaaaatggatcaagctgatgcacagtttcattttgtactcaatcagtctccaaataatattccagcccttcttggtaagtggtctttggcaacatgttaggaaacagttgttttcagcatatgcctagaatatatctcttggtaatagctccttaataactcagctagacagcaaagtagaagagctttatgttgttacaaatgaaattacctacaacaaatattgttgaaattgtagaaataaaatatataccagttaagaataatttattatttaggccaggcatggtataatctcagcactttgagaccctgtctcgttatacctgtaatcccagcgctttgagagactgaggcaggaggatcacttgaggccaggagttcaagacgagctggggcaacatagcaagaccccatctctacaaaaaataattttttcaaaaaagagtaattggttatacacttctgaagagccaataaacaatctctacttagacaacttaaagttatttcaattattactttataacattttttaaacttttattgaagttcagtggtacaagtgcaggtttgttacataggtaaacttggtcatgggggtttgttgtgcaggttatttcatcacttaggtattaagcctagtacctattagttatttttcctgatcctcttcctcctcccaccctccaccctccaaaaggccccagtatgtgatgttcccctctgtgtccatgtgttctcatcatttagctcccacttataagtgagaacaggcagtattcagttttctgttcctatgttagtttgctaactttataacatttaacataaaaataggaagttttatttttagacataaattagtatacttttatgaaaaacaaatttttaatatgaaattttgttctgtgttttcaagtatttctcactcagagatgtatttaacttagataagttagtgtaaaacataatagacttgtagcctttaatcagacactgtgtttatttttaaaaatcattacaggtaaagcttgcatttccttcaacaagaaggattacagaggagctcttgcttactataagaaagcattgcgtactaacccaggatgtccaggtaagagaaaaattttattttatgtctaaactgtgtattacccagcttaaagcattgaggatttgtcagttgcttatgaagttatgaaaagatattgttggattatagaaatgtcagaatcaagttttttttttgatgctatgtttgagtcaaaagctggatagtaaggccaggtgcaatggctcatgccaataatcccagcactttggtaggcagaggcaggactacttgagcccaggagtttgagaccagcctgggcaacgtagtaagaccctgtctctacaaaaaataaaaaagttacatgagcatggtggcacacacctgtggtcccagctccttaggaggctcaggctggaggatcgcttgagtctgggaggttgaggctgcagtgagccatcattgtgccattgcattccagcctgggcaacagaacaagaccttgtctcaaggggaaaaaaaaatagatagggtctggctgcactggttcacacctgtaatctcagcactttgggagggtgaggtagaaggattgcttgagcccaggaatttgagactagcctttgcaacaaagggagacccccatctctacagaaaatcagccgcacatggtagtgcttgtggtcgcacctacacaagaggctaggcaggaagatcacttgagcctaggcatttgaggctgcagtgagccatgttcatgccacggcactccagcctgggcaacagagccaagaccctgtctcaagaaaaaaaaagtctggatagtagattataatataatctttttgccctatactatttttctttccaaaatgtcattcatgtagcaaatttttactgagtaccaactatgtggcaggcagtgttctaaaccctgagaatgtagcaattaaccaaagagacaaaagttcctgccctcatggagtccagttttcagtgggcaagataaatagtaaagtatgtatgatgtgtaagctaccagtaagagccaaggagaagaataaagcagaaaaagggtatgagaagcatcaggaattgcttagaaaggatgaccaaggaaactcatcagagatagtgacatttgtgtgaagacctaaaaaacaactagcagccatgcagatatataggagaagaccactcctagagagagagcatagaaggtacaaaggtccagaggaaagagagtgcctggtaagtttaaggaagagtaaggaggccattgtttctggaatagagagagaaagagttggggggaaagtagtaagaaatggggtcaaagctataaccagggactgactaatcacgtagggcatcacagattattgtaaggactttagtttttacatcgacagagatgggaagccattggagggccttgggcagcagagtgacgtgatctgacctatatttaaaaggttcgtttgagctttggggttgagactagagtggggctcaaggggagggggtcaaggacagaagtagggagagcagggagaaggcatctgcagacaggcaggtcagaggtgattgtggctcacactagggaggtaatagtggagttggtacaagtggtcagattctacatgtattttgaaaggagagctgatggagtacctatgatgtataagacagagaggaagagtcaaagataactcccttgcacaagcaattggaaaagtagagttatattttactatatttgggaaatagtttaagtggaactagttttagacctgaaaagtttgaaataccttttagacatataagttgtcaaattaagcagttcagccttaaagcttttagagctttatcctgagccttgagaagaatgtggctatacaacctgagtcacgtggcatgcagttgcaatttctgcctttttttttctgtaaacaattaagatcaaatggtgccagaaataagatccccctcacatggagcaataaaataatctttttagaatatagcaatttgtaaccaatcaaattgctgtgacataggcacctggtgttatattttagaatgttacaatcctactagaacttctctatttcccccaaataattaaaaccttaactttttcactttggaaaatgctgatatcattcatttggagtcagtacttttctggtggccattctcacaccttgcactccaatacactctatacttaatcatattttccaaatcccgttatttaaaattgacaaagtgaagacagcagaaaggctggaattcaggaaagaggtctgggctgaagtcatcaacatatagatagtgtataaagctgtgaatgagtgcaaatagaaaagaggtctagaggtggagccctagagcactctgatattaagagattagggaaatgaggaagaatcagcaaaggagactgagaagataatagccagaggtataggaggaaaatagggtaagtgcattgtctttaaaggcaaatgtaaaatgtttccagaagaagatgatgaccaacagtgtcaaattctgttgttaggtcaagtaaaatagggacacagaattgatcattggatttagcagcatacaaatccatagtgaccttgataaaagcagttttactggaatggtggggtgagagcttcactggagtgtattcaagagaaaatggaaggaagggaattagacatagcaagcgtagctagatcattctgggagttttgctattgaagaacagacatgatcgacaactggaaagggatatagaatcaagagaggatttgtataagatggcagaacgtttatgtgtagatgagaatgaatgatccagtagagagaaaaaataggggagggttgctggagcagtattcttaaatagataagagggcatctagtgaccagtatggtgattggctttagatgggaacttgtttgtgttttggcatggccttaaatgaggtagcacatatgagcatagctttgaaaggaacaatggtatgtgcccataatcagtcatattatttaaggtcttagtggaacttttgttctctgtttaaaaattgttcttcaataatgagaaattgaaggtatggttagcagcgatgttagaagacaagaagaataccagtattataggtgttctgttctatagtgagaaatgtgtcagtgatagaggagagggttggaatatggtatgatgtagcctccaaggaaaccaagtttgtgataggtcaaaagattctgtagtgtagttatactgaggttaattttggggattttgcaactcataaatagagaatgtttaagcatttttgtaattgaactctaaaaaatgccctagtttgatagattgaatgacttcattttatagcggaagttcgtttaggaatgggtcattgctttgtgaaacttaacaaactggaaaaagctcgtctggcattcagcagagccctggaactcaattccaaatgcgtgggagcattggttggactggctgttctagaactcaacaataaagaggtatgtaaatgaaaaaagtatctagctcctaactgctttgtcaggcccacagcctcttatctaaaactcttggagccagatgtgtcttagaaattaagattacagattacagaagggtacctgtactttgtaatgtataacacctagttattggggcactaccccaaaagcaaacttatatttctgtggcaaaatgatagactgtttacactagtaggatagggttacaattcaggtagtattgccaccaaataagtttgctccaagattaccaaaaaaaaaaaaacagaaaacaaaacttgttttttaaggcatttagatttcagaatctcagataaggggtcgtagacttgtatatcagtttggaatgctttcattgcacgtaacaaaaaacacatcccagtgccttaaacataagggcttttagtgtttactaaaccagttgtcaaaggtctcaaatttgataggtccttgtcgtcaaacctatgattttatataattccgtcctcccttccttaatgtgcagcctttcttcatcatgtctgtcaccttatagtcacaagatggctgcagcatctccagcttctcattattacatcggtcttataaagagggaggaaagagaaaggataaaaaggctttctcttagagaagccctgtcttatattgagaaggaagctctccatcatgcttccccttatgtataattgtccaaaacagggatacctgggtttctcagcctcagtactattgatgttttgggctggataattctttgttgtggggaactgtcccttccattatagaatgttttaacagcatcccgggcctctacccactaaatgccgatagcgttcctccaattgtgataaccaaacatgacttcatccccagttgagaaccactaccttaggccagaggaaaagattatctggactggtgtagatcaatcatgattcatcccccgggcctggggaaggggggaagggaactttccttcctaaactcaaaagattttcacaggctacaaaatctggattctgttagcaggatgagtggtaaaatggctgttgggtaatccaccagtatcagtcacacgaagaaaacagctcggatcaataaaaccaaaggtggtagaggccaggcatggtggctctcacctataatcccaacactttgggagatcaaagtgggaggattgtttgagcccaggaggtcaaggctgcagtgagctgtgttcatgccagtgtactccatcctgggcaacacagtgagatcctgtctgaaaaaaataaaaattaatataaataaataaaaacaaaggtggctctttgtgggagaagtaggggcagggactaataaagtagatgagataagtctcaagcaagaactgaacaagaaaataaaaaggggaaaaaagtgacacacaaaaaaattaaggattaaaagagagatttaattacaaatgcaatatagatatttaaaatcataagaagcttctaatccgttttagtgtctgatcttaggatttataacttatttcttgtgactaaagaaaacttcttgaaaagtgctaatttagtattgttttcactccaccttgttgcaatgttttcttttaggctgattccattaaaaatggtgtccagcttctttccagagcctatactattgatcctagcaaccctatggtattgaaccatttggcaaatcactttttcttcaaaaaggtagaagtcatttatttttaaattctgatttttgtttttctgtactgcaattgatattttatttcttttttaaacttggaaagaaatttgaaaatgtcagattttttcccccctccaaattatagagtttgttgtattagttacctgggggtacctacatttgtttattcatttatttgcttaatatttattgacccctatatactgtacccaacactgtggtagtgatgtgaagattagtaaaacatggtgtctgtactcaaggagttcaatttcatagaaaaagcagccatgtaaacaaatgtaagtgtaaaaataaaggtatctactcatttatggtagagaaatgaggaagtggtcagatggcttaggtgaattttcaccaaggctgcagagcttttgaactaggtttttaggaagaggtcactagagagttgaaaagggaaagacacacaaatctatgaaatagtgtataatatacttatggtaggcaatgctttggattcagatagtggagcatttttgtaataccagaatttggacatgctatgtagggaacaaggagtcactgacatttttattttgcatgttaatcatgttgtattttttaagttgccactaattctgtagaagcagtggtattttaggtttcttaaaatactaaatctactgggagtagtggctcatgcctgtaatcccagcattttgaggggccgaggtgggaggattgcttgagcccaggagttcaggaccaacactggcaacatagtgagacctcatctctacagaaatttttaaaaattagctggacatggtggcacatacctgtagtctcagttactcagaaggctgaggtgggaggatcacttgagcctgggaggtcgaggctgcagtggtgagccatgatggcgccactgcactccagcccatgcaacagagtgagaccctgtctcaaaaaaaaaaaaaagtgcgctttatgtatttacttatgtaatcttcacaataattctatgatgtaggtaatcttattcccattttgtgggtggataagttgaggaagagttaatagtctaaagtcagtaattcactatgaaaggggagtatgtttctacagccagagnnnnnnnnnnnnnnnnnnnnnnnnnnnnnnnnnnnnnnnnnnnnnnnnnnnnnnnnnnnnnnnnnnnnnnnnnnnnnnnnnnnnnnnnnnnnnnnnnnnnnnnnnnnnnnnntattgattaggttataactgttatagcactgaaaggcaactatttatgaagaagatggaaatgtatcttacaggtaaacgaagtgttagtctaagataaaacagctatgcaagctagtcttatgaattcactcagttgactttctgatctttgttcaggattatagtaaagtccagcatctggccctccatgcattccataatacagaagtggaagctatgcaagcagagagctgctatcagctagctagatcattccatgttcaggtaattttataacttctctaaatgtctaatctttttacttatagtgttttaagtctttccaatacttttgtacatattggtcttttttaattttcattctttaggaagattatgaccaagcttttcagtactattatcaagccacacagtttgcctcatcctcttttgtgctcccattttttggtttgggacaaatgtatatttatcgaggtgacaaagaaaatgcatctcagtgctttgagaaggttttgaaagcttatcctaataattacgaaactatgaaaattctcggctctctctatgctgcctcagaagatcaagaaaaacgagatattgccaaggtacatcttttttttaaagtcttagctgttttctgttagctgtcccaaaactcccatttctcatttcctgttattgctagtagaaatatgatagaaacagttttgttagctgagcttgttccagtttagataacaaacaatggatttattaaacagacttacatagcccccactttttattttgacaacctatagatggaatacttcagcttaacaatctcttttatcccagggccatttgaagaaggtcacagaacagtatcccgatgatgttgaagcttggattgaattggcacaaatcttagaacagactgatatacaggtattttagtaatgttttttaatctctcatatgatgtgttttttgtaagcctggtgtagtgtctctcttccacttacacctttttctgtcaatcatgaaaatacagggtgccctttcagcctatggaacagcaacacgaatccttcaggagaaagtgcaggccgatgttcctccagagattctcaataatgtgggtgccctccattttagacttggaaacctaggggaggctaaggtaggaaaatagaaatatttccttcttttatactgaatcaagttgagttgcatgcacacctttttaaaaagtgtataaactaaatcttttaacagtgtgatttttctttctcatagaaatattttttggcgtcattggaccgtgcaaaagcagaagcggaacacgatgagcattactataacgccatttccgttaccacgtcatataatctcgccaggctatatgaggcgatgtgtgaattccatgaagcagaaaaactgtataaaaacatcttacgcgaacatcctaattatgttgactgtaaggattttaaacttctttatgtaatgaaatccgttcattcccacaagagcagcaaaaatttagcctgaaaaaaatttagaattgatagtaaaaattgtttaaggttctaatgtccccatttctccagggcaaatttgtggccttaaaacaaaggtgcagctttacttacatttgtgctagaaataagcaactaaaaccaattggaccgtatttcaatgactaggttatcttcagtgggtcagctacctttgttaggcttttaacaactccttggcatatctgataatgcatttacctttgaaacatccttctttgatttcatatgaacattcttacaatgtttataatagtgagaaagaaaagtgcttttcctttaaacaattattgctaaaatgtcctaatttgagtttcgcaacctatacgttataaaataaggaaagtttttaattaaaaaataatttaggcctggcatggtggctcatgcctggaatcccagtactttgggaggccactgcagcgggatcgcttgagtccaggagttcaagaccaacctaaacaaccccagtagcaagaccccatctttatattttaaataataataatatacatagtgtacttaattttatttgtgtgtatgagggtttttttgtttgtttttgtactttctttaaaaagaacctaaagcatgatgttttgactctagtaaatcaggaggttttttgtttttttgttttgttttgtttttaagatggagtcttgctctgtcacccaggctggagtgcagtggcacaatctcggctcactgcaacctctgcctcccgggttggagtgattctcctgcctcagcctcccgagtaattgggattacaggggcccacgactacgtccgactaatttttgtgtttttagtagaggtggggttttgctacgttggtcagactggtctagaactcctgacttcaggtgatccatccaccatggcctcccaaagtgctgggattataggcgtgagccaccgtgcccggcatatcaggagctattaacttggtgcctatcatgctgttatggatgcaaaagtgatttaaaataagcaagatttcagttgaatgccagactgaatttgaattgatttgataggcagtagtgaaccattattggtttcctgagagaagtgacatttcctagagaaaacaacaacttacatttgtgtagcacttcactattaattaatggaagaaccccagttagagcccagatcttctaagtagtaatacctattcatcagactttcactgttttgccgtattacaagcagctttttttaaaaaaaggtaactgacaatggtgtgcattggagagaaattagaaacaggccggttccaagcttttaaaataacttagcttgagataaggacttggaccagggaactagcattgggagtggagtggcagaggtaagtcttagatttcaaacagtaagtctagatggtgacaaaattattctttaacttgttggatggatgattgatattttttcacctttgggacttttctgttccttttatggcggtattaatgaaaaaaaattgtttcaaaagtatgactttaaaattatgatcctttatagctaatatttgggatataaaaacttttaaatatgttttcaggctatttgcgcctaggagccatggctagagataagggaaacttttatgaggcttcagattggtttaaggaagctcttcagattaatcaggttggtaatattaactcttaggtttgagaaataattattttcacttttccttccccataaatcagtttttccttttaatggctacatcttcctggttttgtcattttttgttttgttttcatttacttgttagatactaaaaatgtactaggttgcattattaatcatgttataaatagggaccatgtttttttatgtaaatctttcctattgtcttcctttttccttcttcccttcccccatcccgtcctttcactccacttcaacaaatgtgacctgactcctgtgttttttactctcactagtttacttcactttcagtttagttagtaccatatgagagaactttatagcatagtatcttaggattttgtatggaaccatagctatggtcatctaaacgttttgagggcccacaaaaagaaatagatttcacatcatagcctagtacacacaaatgtatatatagacaaacaactgaaatgaaagtttcacaaatcattatttgcttttgccaatgggcgatacactgatatttttactttattccattctgttgcatttactatgcagataactaaagactaactaaatggattttacaacttactaatgggtatcaactcagtttgaaaaccactcatgtgggggtctacaacaagaagtgtatattttcaaacaattttttaatgatttaacaatttttgtaaatcattttcaggcttctgcagctgtagattctcactgtgaatcccatgcttgctcatgcctaagggtatttgcaataccaaatatagtttagtatttttgcctgttagtgatggttccacgtttgtaacgttttggttgagattttaaatggtggacaagtactgtggatgtgaatgtggggaactaattttaatcatatgtaattggtcacaaggcctaatttgcagtaactattgctgttttatttaacagtgccttgttgctttgtatgcatttatgtctggatgtaaagattgtgtggctatccaacagggagccacagtatttaaattgaccaacctaatgttacaactactttgaggtggccacatgtaaactgaaagcattaattaaagtggtgcaattttgtataacttagctttagcattagtagttcgataaatttggattgccatgcaaaaaaaaaaagaaagaaagaaaagaaagaaaaccactgttgtaatatagtttgtaaacctcttcagtaatcagctattgtgggaagatgattgatctctgtcaaactaaactgcagattttccttcttcatgtatgtatgtttcaggatcatccagatgcttggtctttgattggcaatcttcatttggcaaaacaagaatggggtcctgggcagaagaagtttgagaggatattaaaacagccatccacacagagtgatacctattctatgctagcccttggcaacgtgtggctccaaactttacatcagcccacccgagatcgagaaaaggtaatctctttttgtccttttaaacaaaactgatactctacattctcgtttgaatcttttttaagagcacttgtttctataggaaaagcgtcatcaagatcgtgctctggccatctacaaacaagtactcagaaatgatgcaaagaatctgtatgctgccaatggcataggtgattataagacttgagtacccataacaatttgtttcaaatgaatactttcagaggaatgtttgtaaatcagaatttttcttaaaatgtgatcaatgtagttgttttaaaatagaatttttagttgtttttctgactccaattagaaaattgttaagtgtgaacctttttatatctttaggagctgttttggcccacaaaggatattttcgtgaagctcgtgatgtatttgcccaagtaagagaagcaacagcagatattagtgatgtgtggctgaacttagcacacatctatgtggagcaaaagcagtacatcagcgccgttcagatggtaatagcttctctttcaagatatttttatatcttgttcattgttaagcagatgttttcttagccattctggccctgtcatggagctgcatgctatctcttgtgatactgtgtctatttagagatttataattatataatgctaaggccaggctttggtatccagacagagatgtgagtcctggttccaccactaattacatgcctcaggcaaaggacatcctttctgagccagttttcctatctataaaatggagataattgtaccttaacttcatagaattttgtgaggatcccgtatgaaaactacttggcactagcatgcctagcatattagtaatacccagtaagtagtaggattgaatatttatttgtgtattcagtttctgaaactgaactgtgagttttagaaaggttaaatgacttatttaaaagaaaacaggccaggcatggtggcttactcctgtaatcccagcactttgggaggctgaggcggctgaggcggatggatcacgaggtcaggagttcgagaccagcctggccaacatggtgaaaccctgtctctactaaaaatacaaaaattagctgggcatggtagcacgtgcctgtaatcccagcttactcaggaagctgaaacaggagaattgcttgaacctgggaggcagaggttgcagtaagccaagatcctgccactgcactctagcctgggcgacaaagccagactctgtctcgggaaaaaaaagaaaaaagaaaacaaaacagcgataagatttaatgactgtagaatttttttatgcttacatttgttgagtgcttgagctcgaaataaaagtcatactcagcatccataaaattaaaaagtaaaaaggatcttcggctctgtgggatatattatggtcagaaaggaaaagcttacaaaaagtagacaaaaagagcagtccaggctcctgagaagtggtttacctttttctaaaatgggtgggttattaccaatattcagagtactggaaagtcaataatcacagaaactcacagaacctagattgcatatggagcttcagaggttgtgttttgtgaggctggccttcctgatctgctgaatgataatgttgtcttttataaatgcaaattaactactagggatattcaggaaaaaatggtcttaaccatttttcatgaaaaaggtcttacctatgacaagaggtattccatggtcaaaaagtgctatgttcatgtcacaattaacactagtattgtattggttttaccaagaagttaacaaccagaactgtaagactcctcatgctcattgccagtaggttctgcccattgttaagaaaggtgtagatggtaaaacgcaaaggacaacggtgtatgacttctcatcagtggtcaataagctgattctagatagtattgctaaaagtatgaaaaaggctttccagtctgtttaccctttctttcaatgttggtccaaatttcaaatggaaagaaaccatttcaagcatctagtttttctaatggtcagattttttatgttgtgaaaatgtatcctgatgaatgtcaaaaatcattccccaaattattctctgaaattaaccattcaaagggtaaaacacctttttacagagctttaaaattgcaatgccattttgctacaaaatgaaaatgtcatttattctttgttgtgttttaattaacttttttcttttactgtagtatgaaaactgcctccgaaagttctataagcaccaaaacactgaagttgtactctatttggcccgggccctcttcaagtgtggcaagttacaggaatgcaaacagactttgctgaaggtaaaaaggagagatgttattcccatccatttctgtgctacattgtattttttaattcttcgtgatgcgtgttcacatacctactacttaataatactctgctgtctaagatccttttcatgtcatttgaacatatgaaatatttattttttattcacaggctagacatgtggcacccagtgatacagttcttatgtttaatgtggccttggtcctgcaaagattagctacctctgtcctgaaagatgaaaaaagtaatctgaaggaagtacttaatgctgtgaaagaactggagcttgcacataggtaaagattttgtagaaacaacctatgaaatgctttatttggtctatgaccataccatcttgaactctcccgattttgtctgaaatgctttgtttaaagctatttgtctcaagctgctgaaaatcacttccttctaaaggtggtctattagaatcattccagcaatagttaagccaaagcagatagcagctgccaccaggtggtgccaaactatagtcaggatcctgccagatttggatcttgtagcttgacctctagaactggctggctagctttgcaaacttgccatagattttttattaatctgacagtaatgtgacccagcattttacacatgtgaaattttttggacacttacgttggtcttccattttacaccaatgtgtcttttaatgggatgttgattttcattgaactaggattaaggttttacttcttaaataatgcttaatagttttattcagttcagctcaaaatttatttagccatatagtatttatatggtgagtcagtgtgtggtgaaattaaaacctgtcatctcttcaggttttgtccaacttaatatttttattcttgtttaacaattcttgccttgcctggtaaattataagtgctttcatggcctgagccccgtaacctccatcctgacatatttagtaaatttcatgtttagtaaatacttgttgcttgaattgctttgtggttatttgtgaatttactgataatattaaatataacttagaccatcttgatgaacgtgtctattaaatgtaatgagtggcataaatttgtgtaaatcagtcaatatgcaaaccttttctcagactttgtagcacagattaaattttttaagagctttatttcattagaatctctttttttaaaagtgaagtattttctcgtttcatttagatacttcagttatttgagtaaagtgggagataaaatgagatttgatttggcccttgctgctacagaagccaggtaatgttactatttatggaaggtgactttgggtgaggcagtgatatttacatgggctgggaaagtgccacagtagggaacagaggttcctgaccttccacaggtcagtctttcacacttctcttggggactctctaatctttgccaggactttttcctttcagggaattggacaaaattgccttagtacaagtacttgagttctgggggaaaatacttttctattttacttatgtcagctatgtcagcctagtcaagataaaattcatgactctgagttatatgtaaagataatgttggaaatctttttagctgtgctttgagaggacatttatagtttggaaacttaacatagttggcagtattggcttatgataaactaagttaattttgctaattaagactccatacattggtatggtatggcaagtgtaatgcaaaaaaaaaaattttttttggctgggcgcagtggctcacacctgtaatcctggcacttttggaggcctaggtgggcggatcagctgaggtcaggagttcaagagcagcctgaccaacatggagaaactccgtctctactaaaaatacaaaattagccaggtatggtggtgcacacctgtaatcccagctactcgggaggctgaggcaggataatcacttaaacccggaggcggaggttgcggtgagccgagatggcaccattacactctaacctaggcaacaagagcaaaactctgtctcttaaacaaaaaaggaagaaaaaaaacatttttttaaaaaaagacttcacatagatcagctaatggtcctgcttcagattttttaatttgtataaggaaaatagatgtgctgagttttttaatatagtagttacattcatgtttctctaaacctgaaatgttctaggcagtgttctgacttactgagccaggcccagtaccatgtggcccgggcacgcaaacaagatgaagaagagcgggagctgcgggccaagcaagagcaagaaaaggagctgttaaggcagaaacttcttaaagaacaggtatcttgtattttccagttatactggaattaatgaattgtgtgcatgcatacactttgtatgtttaaaaaaaaaagtcctctgccaggcgtggtggctgacacctctaattccaacactttgggaggatgaggtgggtggagggcggatcacttgaggtcaggagttcgagaccagcctggccaacatggtggaaccccgtctctactaaaaatacaaaaattagccaggagtggtggcatgcacctgtaatcccagctactcggggagctgaggcaggagaatcacttgaacctgggaggccaaggttgtagtgagccgagattgcaccactgtactccagtctaggcaacagagtgagactccatctcaaaagaaaaaaaaaaatcctctgcttaggatggtagccattaatttttcatcataagaaaatttgcagtggggtttcttttctaccatttttcctcataggaagagaaacgtctcagagaaaaggaagagcaaaagaaacttttggaacagcgggcccagtatgtggagaagaccaaaaatattcttatgtttactggtgagactgaagcaacaaaagagaagaaaagaggtggtggtggtggacgggtaagatataattcctgctagcacaagtgacctcattctctgtcttttggctttgagaaatgaggataattggttaaattccttctgtacttactagttttgacttcctcttttgttaagagacagtcttctaacacagagaatgatttaaatggtatccagtatttagcaatgcattccaaggtttgctaagtgtattttaccttgtagttatcttttaaatagttgatttttgcagttttaaccagttgagactttcgtctcaattagaagtctaattgggcctagccaagaacctcttccacgtggcttagtaaaagatccttcatttgggccgggcacagtggctcatgcttataatcctagcactttgggaggccgaggtgggcagatcacttgaggtcaggagtctgagaccagtttggccaacatggtccatgtctctactaaaaagtacagaaattagccaggtgtagtgatgcatgcctgtagtcccagctacttgggaggctgaggcacgagaatcacttgaacccaagaggcagaggttgcagtgagccgagattgccccactgcactctcgcctgggcaaaagagtgagacttcatctcaaaaaaaaaaaaaaaaaaatccttcattgtcaaatgacaatggatatggcccctttctgtaccttagcattctaaccacattccaccaaccaggaaataactgactatagtgttgtttggattttagcgttctaagaagggaggagagtttgatgaatttgtcaatgatgacactgatgatgacctacctatatccaaaaagaagaagagaagaaagggtagtggcagtgaacaagaaggtgaagatgaggagggtggtgagagaaagaagaaaaagaggagaaggtaatgtcatcattaatgtgctttaagtaacctcataaaagtggtgaaagaccttttaccttctgaatcttttgatgtttagaatttatgaacacttgatccaaacagtgaagctttttgtgcccccacttcctactttaatcctaagatagaccccagtacaaaatccactgagtacctgggatttccatacgtctccacagctttccttctaagcgctgcaagttagtcataattgcctttcttgtgtctctaaatatttattggaaaacatgtgatttagaataagacctggattgtgtccacactaactgtgcatgtgcaatcttggaaaaatcactaagcctcagtttcctctctgtcgttggtaacagcaatgcctacctcatggtttttgctcaatgcataagatgtgaatgtgtgtaaaagtgcctttaaaaccacccagtgttctctgctgttaagatcaaggatgccctacccatttctcatgcggaggtgcctcctaagctactttggccctctcttgttgtgctatcctgtccccaggaacctccattcagttatcttacctagactgcccttcccaacccttggccgactatatttgggaaagaacctgctactacattaagacacagacttgtggaattgaagctgtggtgaggatattagtagcagccctggaatcaatagttgggaaagaaggaagaggaagggaaagacgttgaagtctggagcctgggtcttttctcatcttctctgtcactctaccaagtgcaagattcaaatgcaaattaatgagagctcagcagtgactaatcagcagacattgcataaatacatagtttttacatttctgagccacgtgcagcaagagtaagttatgtcccctgcccttgaggagtgtacagtatgattgaggacagcacccatatagaagaggattcagaatgaataataatttaatggcaaagtagtctggaactttataggtaggctcttgacaaactctctcttggtgttcactatttaagacatccaaagggagaagaaggatctgatgatgatgaaacagaaaatggccccaaaccaaaaaaacgacgtccaccaaaagcagagaagaaaaaggctgtaagtttatagtactgtgtttttctgtcccctagtagatgtgaaagattgcagtacactagaatacattctttccttgcagctttctcaagcacaaatgcttgttttcaaagttcatcagtggctgtttgattgtatcattgtaatgcaaacccaatttaacaagatggcctaatgtaagagtcttgactaatctattatgtttgacattctttagcccaagccagaacgtctgcctccatcaatgaagggaaaaataaaatccaaagccataatttcatcaagtgatgactcttcggatgaggataaacttaaaattgctgatgaagggtaggatattttctctttgtaaattcttctcatgatgtagataaatcaaaagtgattactaatcagcctgtctgtactaagaaaaatatacttttctttctttttctttataaataataagaggggtggggacagacttgaaaattggaggaaatagataactgggagtgttgctgtgccgaaatggcttctccccagcttcttagaatctgagagctggaagaaacttgaccctgtcattttgtcctactacatcttttctctcaaataagaaaagcttttttgaagtctcatttcttcatggatgttagctgaaatttcctagatgacatccttctaaatgaaatgtatcattttgctgccctactgttgacacactaaaagtgttacagatagccaggtcctggtcatatggagataggctatttctttttattatttatttatttatttatctatttatctatttttgagacggagtttcgctcttgttgcccaggctggagtgcaatggcaatcttggcttaccgcaacctccaccttccgggttcaagcgattctcctgcctcagtctcccaagtagctgggattacaggcatgtgccaccatgcccagctaattttgtatttttagtagagacggggtttctccgtgttgagagaggctatttcttgactgttttctcccccgttgtgcggtggtaagtcaacagtacctgctccgtggaggacttatcctagactccttccacaagactcctttagttcatggcccacccagtgaagcaatacttgattttatttgtcctaaacttgctcctcaagctcaagttgtcccccatttggatttctcaaccaggtctcttaatactgtactacactgtgttcttctgtagccatcattttcatttattcattcaacagacatttgaacatccagtgtgtgagacagtgtaagtgctgggaatacagagagaaaagataggcccataaattctccaaggaatttctgcttcagaggcagtggaaaagaacagataaaccaaaaccatgttgtaggctgggcgcagtggctcacacctgtaatcccagcactttgagaggccaacgtgggcggatcacttgaggccaggagtttgagaccagcctggctaacatggcaaaaccccatccctactaaaaatacaaaaattaaccaggcatggtggcgtgtgcctgtaatcccagctactagggaggctgagggacaagaatcacttgaaacgaggaggcagaggttgaagtgagctgagatggtaccactgcactccagtctgggcaacagaatgagactcttgtgaaaaaaaaaaaaaaaaaaaaaaaaagctcacattatagttggattaatgtatcatgtaaatttgcattattgttctccaggaaccatacctagtcttgagtttgggtggtggtaggagttgtaagagatgtttttttctaaaagaaagggtgtttgagttgagtcttagaagaattgggattcctgaggcagaggttagcatgttgaggaggctaaggcttctggtggggattggactcatagggaggtaatctataaagaaccagatttgcagttctggccaggtgaggtggctcacgcctataatcccagcactttgggaggctgaggcaggaggatcacttgaggccagaagtttgagactagcctgggcagcacagtgagactagcctgggcagcaagtgagacagaaattttataaaagcaaaataaacaaaaaaaaaaagatttgcagttccctttttctctgaaggcaccggctgacacatctggattgtttttccgtaaagcactgtttagcccttgtccccatagtgttacccaggtctgtttagagacatgcatgatcagtgtaatgaaatacgtggttttcaaagactgagcactattaaatgtgttggcagaaaggtccattgtgagaggctgagctgctgccaaatctgtacctgaggtcaaggccaagtttgtttgagccacttgcatcagttaagctttgtcctgaccatcataaagtgtgtttgcttatttggcaagatggaatggagtgaattggatcccagggaagacccacaggtctttaatatgtatacagaaagagagtaatatatttcacctccctcaccgttcctagaccgaactctgtgggattcagtattcctttattggaatatctgtcatgaaaaccagaactaaggaacgtgccagagaagtgtgcctgctccaaaggagcggtcaccgtggttaagggaatgttctttcctcagagcctccaggaagccaagactctgagggtgctgccaccattctaagcataagcatgacttcccctttcctttcacttatcaactgacaagtagaggggagagcttgggagcaaagggaaataaaccaaagggcccctttagccccagttccctatcttgagcaagtctggtcatggtggaggggacctagtgcagtagcaaatcttaggacaggaataatgacctcactcttcaggtacctgttagcaccgatggcaataggacagggaaatgtcctttgaaacccttttctgcctttggaaaagggttaattcttcaaagtcttcaagccagttgagatcctggatttcacctttgttgctgttaatttgtgtacagagataaacaaatgtatcccttccttttcataattttatatatgaaattgggaaatgcttcattctgatgaaaagtgtccagtgagtcaccatccctgtttatattttgacttatagctaaagtgccttatctttttttcctttttaaacctttttgagttgtgaaatatatcacatttacagaatagtacacaaaacaagtatcacagaatgatacctgtgtaaccactatttaggtcaagaaatagaatattaaatgcccttctgttttaaaagcacattgtctgctcatcaaggccccagttagccagaatcctcagcttctaaccaatgatcatctttgccagacatcccaggaacagcaacagcaacagtgactcagacgaggacgaacaacgaaagaaatgtgcctcatcagagagtgattccgatgagaaccagaacaagtctggcagcgaggccggcagtccccggaggccacgaagacagcggtcagatcaggactcagacagtgaccagccatccagaaagagaaggccctccggttctgagcagtctgacaatgaatctgtgcagtcagggagaagccactcaggagtttctgagaacgactctcgcccagcttctccaagtgccgaatcagatcacgaatcggagagaggatctgataatgagggttctggccaaggctctggaaatgaatcggaaccagagggatccaacaatgaggcctcagatagaggctcagaacatgggtcagatgatagtgactaggttttatttcatcaataagcttcatctctggaggaaacttttttaatatatgaaagctgtgataaaaatgtttcagatgtttagtcaattgtgaaatttttcttaaggcaattttcttttctatcagtttgtatattactaagccccaagagacatttcctgtgctagagtccaatatttgagtctctcgtgcaaatgagactattctttgtggtacaattccacctatcatatgtgaaaactgcagtaaaaataaacccagatgctaaatcattcctacaaaggtttgactgaaactgtggcagatgtctcatcttctttatatgttaagcagcatactcttctgatttttattgcaatcttttaccaagtggtgcacaaacttggtattgatgtctttattccattttgagtttagattgagaatatttttattttctgaaggcagagatatctactgtataattgcaccaaagtacatttgaaaggaaggttttcaatagtgtaatactgcagcgatgtagataaaatcacaaatgtataatgtgttaggttgaataaggtgtggaaaatgcttttctgttagtagaatgcaaaaacctacctaagccacataataataaaattcttttaccaacttttatgggtaacttcgtgtctttttttgttcgatatatttgtgcatggcagtgtagcataaattatgcaaatatttgaaaaatcctacattaagcctcaagacttttataattcttacagattcgtggagtgtttattttaaagatgcaagaaaactaaggtaccagcatgtatttttattttcagtaattcagtaattaacactaatatttttatgtagtggtttgtaagagatttaattatggtagtcaacaagtattattaaatgtgctatattagccattgaggtgagaatgcagagataaagttcccttcttgtcttcaaaaattgagtaaagataaatttgttgttcctgtggtgtgagaaatagggtgatgatgtttgcacaggttgtgggagcaaaaaggaggttggaagaagcagtgaagacaaggtttcttgaaggacaggagtcctgagatgactcagcctgagccagggctcctgcctatacctcaggatcagcctcccatttcttagtggagttggtgtcagcaggaacaggcagcatagataatgggcctagtgcagtggctcgtgcctgtaatcccaacattttgggaggctaaggcaggaggatcgcttgaggccaggagtttgagaccctccctgagcaacctagcaaggccccatctctacagaaaaatttaaaaattagccaggcgccgtggtacacacctatagtcccagctacttgggaggctgaggcaagaggactgcttgagccaaggagctctaggttacagtgagccgtgattgtaccactgcactccagcctgggcaacagagctgagagcagagatactggaacccaggagtccaggactggaatctcacttcatgaccctaaccaaccatgtgactttgggcaagttacttcccctatataggccacgtgcctcatctaaatcaaaccatttctccactgttaatctttgaaagcctcaattcaatgtcacaattagagaataagacttgcattgtctttgatgttcatttggaactagaccaagcaccacaaccataaaattagagctatttaattaaaaaataaattttgttgaaatttacacaagaaaaaccattctgaatctgaagctttaaaccccttccccactgaaattacttaacagtctttttaagcagactatcccgttatagcaagactatatacccaactcaggaatgttgtgaggatgatgagttaaggtaggttaagtgatgaatgcattgtaaattcccaataaaattatgcatgtgattgaattggctctgaatgtttggcactgttcgtcaagcttggctcgtttaacctaagtggggactaggtcagttactctttcacaggtcatcctttaaaaaattcttcctagttccctttgagaaaaatattttgaatctccaggaaatgtgactttcctggagcttttaaagtatcccttgttttggttccactaatgaacaatttccatccctgggagtgtcattagccaaaagaggcaagaaagaccttttaaaggataataatatcatctcgaactggaatttggagcctatgatcagtgcaacttttgtcgtaggggtagtttctgatgctctggtcttttgggtatgctaggaagtatgggttggtggcaatgcttcctgtaatggcattatgggcccaggaaagggtatatgctacaggcaaatcaaatgcgtctagacctcagtgtatcctccgatttggggccgggcaaatcagactgcagctagagtcagagattctcactttggatcagcctctaatgataggaaggctgccctggctcctagtttgactctgacactcgatgtgacaaaatgcttcacttttcagcctcagtatccctatctataaaataaggttgtttatgatccttttaacattctgggggctttctagattattttattcatttatttatttatgtatttatttttgagacggagtcttgctctgatgcccaggctggagttgagtggtatgagcttggctcactgcaacctccacctaactgggttcaagccattctcctgcctcagcctcccgagtagctgggattacaggcgctggtcaccatacctggctaatttctgtatttttagtagagacagggtttctccatgcaggccaggccggttttgaactcctgacctcaggcgatccgcccagctcggcctcacaaagtgccgggattgcagacgtgagccaccgtgcccagcccaaatgattttaaatacagtgtctctacctcaactgcatttttaacttgaggtgtttctagtaattgaaaatcttgtctgctattttaagcctaatttcttatagatacagatatatttgcttacgaaatatatttatttgggccaggtgtggtggctcgtgccagtaatcctagcactttgggaggctgaggtaggaggattactcgaggccaggggttcaagaccagcctgggcaatagagtgagaccctgtctcattaaaaaaaaaaaatttttttttttgagacttagttttactcttgttgcccaggctggagtgcaatggcactatctcggctcaccgcaacctccctctcccgggttcaagtgattctcctgcctcagcttcccaaatagctgggattacaggcatgtgccaccactcctggctaattttgtatttttagtagagacagggtttctccatgttggtcaggttggtctcgaactcccgacctcaggtgatccgcctgcctcggcctcccaaagtgctgggattacaggcgtgagccaccgcacccagcaaaaacaatttaaaaaatttgttttaaggaagtatatttatttggctcttgtcttttgctgctttttgttttgttttgttttgttttgtttttgtttttgtttttgtttttttgagacagagtctcgctctgtcgcccaggctggagtgcagtggcacgatcttggctcaccaacctccacctcccgggttaaagtgattctcctgccgcagcctcctgagtagctgggactacaggcacatgccaccatgcccagctgatttttgtgtttttagtggagacgggatttcaccatgttgaccaagctggtcttgaactcctgacctcatgtaatccacctgtctcggcctcccatagtgctgggattacagacgtgagccactatgcccatccccttttgctgttctttattctgctttatggcagaggtattttgataacattttttcatttttaaaacagtgagttttggaaaatatctcaatttttgtgcatatgccttgatatagctgatcaattctggattgccactactctaacactctgagggcaagtatatttgttcatgaagtccacagctaaatagtgaagagaacacttattagcaaggcatgtggggctggcttttcaggtatcttctgcagaagtcactcaagttgtgaatttaccttctttttaattctgtctcctaaacagacctcgatccagtgggttccccagagtgttttccaggacatgctagttccaaaagatactccttaaaaaagagttcgatagtcaagtaagttatgaaaatgctatagcaattaggaagttttggtgacaattcacagaaaactctgtttcaaactgatttagcaagaaggaaagactgggcacagtggctcacgcctgtaatcccagcactttgggaggctgaagcaggtggatcacctgatctcaggagttcgagaccagcctggccaacatggtgaaactccatctctactaaaaatacaaaaattagcagggcgtggtggcacacccctgtaatcccagctactcgggaggctgaggcatgagaatcacttgaacccaggggacaggttgcaatgagccgagattgcaccactgttctctaccctgggcaacagagtgagattctgtctcaaaaaaaaaaaaaaaaaggaaagataattgtatcctataactggacatctggggggattgccgaaaggaagctacagttcaatcagaagtttcagtattatgaaagactcagttttattcattctttttatcatgcatatagaagagtatatgatgtgataaatacaaactaatacctctatatcccttctagagccctttcctgtgtgcctcttgtgtgccctttcccagttgcacccctctcctttcccatatatgctatgttcgagcaaagtgtttaaacctgtctgggagtttagccccttctgaggatgtaggtcataatttgaacattgctatcattgtgctttaccgtagaaagtgaggtgtcaggctccttgcctctgccctgcgtgaccccttagtgttgattgaaatgatctatttatccccaccagaccatgaacttgaggacagagcttatagtgtttccatctatttccaggggccaatcataaagcctggcaagaagtagatgctaatttatattttgaatataaatttaaaactgaattaactaaacatggaggttgtggcaaggatgggactctgctctgaggcctctgcagctccatcctgctcttctagaatgtgttttagcaaatgcattttgtgggagtcaggtttccacttgaactcagtggtagcatgtggcataagtccaggtccccttcacaaacgcagccacagcagatgcactgccagactctccacgtggctggaaatggtcaggctgctgtttcttacaaactgtccttatgcccaccagcttttcttctcatattgacaattgtgaaggcattgaatgtccgtcaaactactcaaagatcactactcttgagcataatctcaataaatgaacatgtaggtttgtctttagtcccagacagggtggaatgtctgtgatattatcttctccagagggggatcaatgccaaaacctttgttctcttctgaactgctttgttctttgaaacaatactgttttgatctcccatgggagctgctgctccgatttccttaactgaaaagaagtggcgacttcaattcctgccttagcccgctgcggattgtcctggtctgcgtgtgtgtgcctgtgcctaggtgcagacacgctccttacttatctcacttcctgctgcttccagcttggagtggcagctaaagcaattaggccaaggaggtgggagaagggagcatcaatatattccttggccagaagcaactgtgaggggcaaacgctggggctagtttcatggatttaaaaccttgcttccacagcctgcaaccttcttgttggttctagctgaactctggcatgggaaccatgcacctccttctttttcatggtttatagaaatttcagaactcgggttcccacccttttgatcctccaggaagcctcgggaccctcccttctggaatctcacattgcaaacagctgatcttgttctaaacccctattcaaggcagctcggaagttctcagtagtcacatgagctgacggtgtgctccccttgacagctgtggtgtggctggtaggtccttgtccctgtggcagggatgacaaatgccttatagttatttgactctaggcaatggggttggagcatgaggaaagggttggcctttgcaaagagctgagtcccttcatccacaaaaaaggaaatcatgtgtcagtgcaattattagcaagtcagtagcttagatggtaggaagatttaggggatggagttgcttctcaatgaggtagaagctgaggcccagagtcaccgtggctgggaaggcagtacagtccttggtggtcagcaatggggcctgggcggattagggtggatatcagggctcatcagattttaatgggctaatcacctacagattctgattcagtgggtcaggagtgagaccagacattctgcagttctaaccggctttcaggtgaaacgaatccaaagactacactttgagcccgggaggttgtatagcattacaaatgtgccctttctgggagaacaccctcaacttttctttccttgaggcttaaaagcctgacaaagcaatttcagcaggtaggggtggggtgtggagaagcggatattaccaggggcaggaggaatgagtgagaggaggctcagggaggagacgatgtgaaacagctcttgtgaagagtgggcaggtgagcacaccggggaggtggtgaggtccgacggcacaaattttaaaggacctgggccttcagaagaaagaggtggacagaaagcagagtggacactggccacgccaaggccactgggcatgagacgcaaggcagcaggggaagtgatgatgtcacaggacagccaggtttcctttagagcaagaagatgacagaactgtccagagaagatattgaggatgtgggaaatttgctgctgatagaccgtgaggcccagagggtgtggaggaagggttggggagcggggagaggggaggagagggagggagaatgggggcacattagcaggtgtatggagaagttcagcgtgaggtccaggtccatactggggcccttggacttcccgtgggcgaggcagggctgaagcaggctgggaaaacaggtaaccagttccaactgcacagagtagggcctttggggatgctctttcctgcactcgggtgatgcactgatcctgtttttggaggcatgagggaggggcagtagaacttcaggagaggcgtcactcctgggacaggaagctggggtgccccactccagggcccaggtgtctcagccatggagtggaagccccatgcacgcgaccttgtctctccagggcatgttgttatggatgctgcctttttagagcaatgtggtcagacaatgctgtccccacgcactggtgacttggtggttacagctcagcatttccaaagataaagcaatagttgtgggtttttttttttgtttgttttttgagacggagtctcactctgttgcccaggctggagtgcaatggcatgctcttggctcactcaacctctgcctcctgggttcaagcgatcctcctgcctcagcctcctgagtagctgggattacaggcacacgccacaatgcccagctaattttttgtatttttagtagaaacgggatttcaccatgttggccaggctagtctcagactcctgacctcaggtgatccacctgcctcggcctcccaaagtgctgggattacaggtgtgagccaccacgcctggccaatagctgtgtcttgagcttcaaatatcatagatgcctgagtataaggtgtcctgaatataacgtgaccccatgcccactgtaaaggttctctgtctgcccaaaagatttttcactaacttaaacttacaaactttggggatgtagatgaaatagttcaatgtctactaataatacttattaaatttaaaatgtgtttaaatcacacattcataaaatgttgagaacaagtgctttcctccattcatattccatacaataatttcactcaaatttatcacagaatctttgtccattgtacttgagccactttcggaatcatctaacagttttcaggagaacgttgccttcccacccatcgtgttgtttgaggtccaggcttgagagtccatggccctgtggctgaatgtgttgtcctgagctgccagcactcctctgcatcgcattagaacaacaactggccttcccatttgtcccgtaggtggcttttcccatcttcatttgatgtactgctctttcttttttgtgtgagagaggttctcgctctgtcagccaggctggggtgcaatagtcagatcattgcttactgcagcttcgacctcctgggctcaagcaatcctcctgcctcccctccctaccagctaggactacaggaatacagcattgtgcctggctaatttttaaaatttttggagagacagggtctcaccgtgttgcccaggctggtctcaaacccctggcttcaagtgatctcctgcctcagcctcccaaagcagtgagatttcaggcttgagccactgtgcccaggctaatgtaccactttttaaagcaatctttaaaatgcttgtttataacttttgcaaactcttgagattttacaaccgtgtccccaggaataacaattaagtctgtattcaatttctttgacaccaagcctctcgaaggcctccataaacatcaaaaactagctattgattgggatcacttcaggttaatgtgtcatccccaaactgtagattattgtccaaacaaatgtaattgacagggcctcatgtaattggaaattgtcaggcaattatcgtgtgtcaattaaaagtaataaaagtaaaaaacataaacaaaactaacaacacatgtataagatatgtattctaaaaattacacaatgatgaaaacaatatcaaagaagactcaggctgggcacagtggctcacacctgtaatcccagcattttgggaggtcgaggtgggaggatcgcttgagctcaggagttcaagaccagcctgggtaacatggcgaaatcccatctctacaaagaatacaaaaagttagccagatgtggtggcgtgtgcctgtagtcccagctacttgggggctgaggcaggaggatcacttgagcctgggaagcagaggttgcggtgagctgagatggcaccactgcactacagcctgggtgacaaagtgagaccctgtctcaaaaaaaaaaaaaaaaaaaagaaagtcttaaattaagagatatatcatgttcatggactggaagactcaacatagtgaagatgtttctctacaaaaaaaaaaaagaagaagaagaaaaaattgttagagcgaaaatgtcaggctttttttcaagaggataaaaactgcaggtattggctaggcacagtgaaacacgcctctaatcccagcactttgggaatctgagggaggtggatcacttgagcccaggagttccagaccaccctaggcaacatggtgaaaccctgtctctacaaaaaattagccgggcatggtggcccacctgtagtcccagcaacttgagaggctgaggtaggagaatcatttgaccccaagaggttgaggcttcagtaagctgagattgtgccactgctctccagcctgagcgacagaatgagaccctgtcttcaaacaaaacaaaagcaaaacaaaacaaaacctgcaggtatttatagtttgccacattttgttttattttccccatctttggaaatcagctccaattttgactgccgtgtaatagaaaacatgcggactttagagttattcgaactctaaatcctagctcttcctctgacaaatgatgtgactttgaacaatggctccatccccctcagcttcaatttcctactgtttaaattgggataacaatgtctacatcccaggactattctgagaataatatagtcagagttcaaaaaggttagtctttttttcccactgattttttaaagagctttttgtggttaacccttgattgtgcacatgcaaatattttaatttatcctttataacattttgggacaaacagattaataggcaaatctgtcaacatttcccttcatcgtttctggatatgtatatttttttcacaaagagatagatgttccatgaagttaaagcttaggcatcagggtccctcacttgcctgggcctcttccaaggctgcacctaatttttcatttgtgattttgttttctttttcctaaagagacctccaccacccctgccaaattatgtaaacttcaggccctacagaatctggaactttcccgagtaacgtgcttagaaaagtcacgtcaccctaggccgggcacggtgactcacgcctgtaatcccagcactttgggaggctgaggcgggcagatcacctgaggtcaggagttcaagaccagcctgaccaacatggcaaaaccctgtctctactaa

SEQ ID NO: 511 - DNA, 4322 bp, Homo sapiens
tgtttaagcggctgacgggaaggagaagccagagctccagcggcgccgcggggcggcagtcaagaccagagccggagccgtcactcacctctggattagcctgaagcggagactaccggctgcggagcggcggggcgagacacttgctcgccttttgaccccatcatgtcgcggggctccatcgagattcccctccgggacactgacgaggtcattgaacttgacttcgatcagttaccggagggagatgaagttatcagtattctgaaacaggaacacacacaactgcacatatggattgctttggcgctggaatactacaagcaaggaaaaacagaagagtttgtaaaattgttggaagcagcacgtatagatggcaatttggactatagagaccatgaaaaagaccagatgacttgcttggatacattggcagcgtattatgtacaacaggctcggaaagaaaagaataaggacaataaaaaggatcttattacacaggccaccttgttgtatacaatggccgataaaattattatgtatgatcagaaccatttgttgggaagagcctgcttctgcctacttgagggtgacaaaatggatcaagctgatgcacagtttcattttgtactcaatcagtctccaaataatattccagcccttcttggtaaagcttgcatttccttcaacaagaaggattacagaggagctcttgcttactataagaaagcattgcgtactaacccaggatgtccagcggaagttcgtttaggaatgggtcattgctttgtgaaacttaacaaactggaaaaagctcgtctggcattcagcagagccctggaactcaattccaaatgcgtgggagcattggttggactggctgttctagaactcaacaataaagaggctgattccattaaaaatggtgtccagcttctttccagagcctatactattgatcctagcaaccctatggtattgaaccatttggcaaatcactttttcttcaaaaaggattatagtaaagtccagcatctggccctccatgcattccataatacagaagtggaagctatgcaagcagagagctgctatcagctagctagatcattccatgttcaggaagattatgaccaagcttttcagtactattatcaagccacacagtttgcctcatcctcttttgtgctcccattttttggtttgggacaaatgtatatttatcgaggtgacaaagaaaatgcatctcagtgctttgagaaggttttgaaagcttatcctaataattacgaaactatgaaaattctcggctctctctatgctgcctcagaagatcaagaaaaacgagatattgccaagggccatttgaagaaggtcacagaacagtatcccgatgatgttgaagcttggattgaattggcacaaatcttagaacagactgatatacagggtgccctttcagcctatggaacagcaacacgaatccttcaggagaaagtgcaggccgatgttcctccagagattctcaataatgtgggtgccctccattttagacttggaaacctaggggaggctaagaaatattttttggcgtcattggaccgtgcaaaagcagaagcggaacacgatgagcattactataacgccatttccgttaccacgtcatataatctcgccaggctatatgaggcgatgtgtgaattccatgaagcagaaaaactgtataaaaacatcttacgcgaacatcctaattatgttgactgctatttgcgcctaggagccatggctagagataagggaaacttttatgaggcttcagattggtttaaggaagctcttcagattaatcaggatcatccagatgcttggtctttgattggcaatcttcatttggcaaaacaagaatggggtcctgggcagaagaagtttgagaggatattaaaacagccatccacacagagtgatacctattctatgctagcccttggcaacgtgtggctccaaactttacatcagcccacccgagatcgagaaaaggaaaagcgtcatcaagatcgtgctctggccatctacaaacaagtactcagaaatgatgcaaagaatctgtatgctgccaatggcataggagctgttttggcccacaaaggatattttcgtgaagctcgtgatgtatttgcccaagtaagagaagcaacagcagatattagtgatgtgtggctgaacttagcacacatctatgtggagcaaaagcagtacatcagcgccgttcagatgtatgaaaactgcctccgaaagttctataagcaccaaaacactgaagttgtactctatttggcccgggccctcttcaagtgtggcaagttacaggaatgcaaacagactttgctgaaggctagacatgtggcacccagtgatacagttcttatgtttaatgtggccttggtcctgcaaagattagctacctctgtcctgaaagatgaaaaaagtaatctgaaggaagtacttaatgctgtgaaagaactggagcttgcacatagatacttcagttatttgagtaaagtgggagataaaatgagatttgatttggcccttgctgctacagaagccaggcagtgttctgacttactgagccaggcccagtaccatgtggcccgggcacgcaaacaagatgaagaagagcgggagctgcgggccaagcaagagcaagaaaaggagctgttaaggcagaaacttcttaaagaacaggaagagaaacgtctcagagaaaaggaagagcaaaagaaacttttggaacagcgggcccagtatgtggagaagaccaaaaatattcttatgtttactggtgagactgaagcaacaaaagagaagaaaagaggtggtggtggtggacggcgttctaagaagggaggagagtttgatgaatttgtcaatgatgacactgatgatgacctacctatatccaaaaagaagaagagaagaaagggtagtggcagtgaacaagaaggtgaagatgaggagggtggtgagagaaagaagaaaaagaggagaagacatccaaagggagaagaaggatctgatgatgatgaaacagaaaatggccccaaaccaaaaaaacgacgtccaccaaaagcagagaagaaaaaggctcccaagccagaacgtctgcctccatcaatgaagggaaaaataaaatccaaagccataatttcatcaagtgatgactcttcggatgaggataaacttaaaattgctgatgaaggacatcccaggaacagcaacagcaacagtgactcagacgaggacgaacaacgaaagaaatgtgcctcatcagagagtgattccgatgagaaccagaacaagtctggcagcgaggccggcagtccccggaggccacgaagacagcggtcagatcaggactcagacagtgaccagccatccagaaagagaaggccctccggttctgagcagtctgacaatgaatctgtgcagtcagggagaagccactcaggagtttctgagaacgactctcgcccagcttctccaagtgccgaatcagatcacgaatcggagagaggatctgataatgagggttctggccaaggctctggaaatgaatcggaaccagagggatccaacaatgaggcctcagatagaggctcagaacatgggtcagatgatagtgactaggttttatttcatcaataagcttcatctctggaggaaacttttttaatatatgaaagctgtgataaaaatgtttcagatgtttagtcaattgtgaaatttttcttaaggcaattttcttttctatcagtttgtatattactaagccccaagagacatttcctgtgctagagtccaatatttgagtctctcgtgcaaatgagactattctttgtggtacaattccacctatcatatgtgaaaactgcagtaaaaataaacccagatgctaaatcattcctacaaaggtttgactgaaactgtggcagatgtctcatcttctttatatgttaagcagcatactcttctgatttttattgcaatcttttaccaagtggtgcacaaacttggtattgatgtctttattccattttgagtttagattgagaatatttttattttctgaaggcagagatatctactgtataattgcaccaaagtacatttgaaaggaaggttttcaatagtgtaatactgcagcgatgtagataaaatcacaaatgtataatgtgttaggttgaataaggtgtggaaaatgcttttctgttagtagaatgcaaaaacctacctaagccacataataataaaattcttttacc

SEQ ID NO: 512 - protein, 1157 aa, Homo sapiens
MSRGSIEIPLRDTDEVIELDFDQLPEGDEVISILKQEHTQLHIWIALEYYKQGKTEEFVKLLEAARIDGNLDYRDHEKDQMTCLDTLAAYYVQQARKEKNKDNKKDLITQATLLYTMADKIIMYDQNHLLGRACFCLLEGDKMDQADAQFHFVLNQSPNNIPALLGKACISFNKKDYRGAYYKKALRTNPGCPAEVRLGMGHCFVKLNKLEKARLAFSRALELNSKCVGALVGLAVLELNNKEADSIKNGVQLLSRAYTIDPSNPMVLNHLANHFFFKKDYSKVQHLALHAFHNTEVEAMQAESCYQLARSFHVQEDYDQAFQYYYQATQFASSSFVLPFFGLGQMYIYRGDKENASQCFEKVLKAYPNNYETMKILGSLYAASEDQEKRDIAKGHLKKVTEQYPDDVEAWIELAQIQTDIQGALSAYGTATRILQEKVQADVPPEILNNVGALHFRLGNLGEAKKYFLASLDRAKAEAEHDEHYYNAISVTTSYNLARLYEAMCEFHEAEKLYKNILREHPNYVDCYLRLGAMARDKGNFYEASDWFKEALQINQDHPDAWSLIGNLHLAKQEWGPGQKKFERILKQPSTQSDTYSMLALGNVWLQTLHQPTRDREKEKRHQDRAIYKQVLRNDAKNLYAANGIGAVLAHKGYFREARDVFAQVREATADISDVWLNLAHIYVEQKQYISAVQMYENCLRKFYKHQNTEVVLYLARALFKCGKLQECKQTLLKARHVAPSDTVLMFNVVLQRLATSVLKDEKSNLKEVLNAVKELELAHRYFSYLSKVGDKMRFDLAATEARQCSDLLSQAQYHVARARKQDEEERELRAKQEQEKELLRQKLLKEQEEKRLREKEEQKKLLEQRAQYVEKTKNILMFTGETEATKEKKRGGGGGRRSKKGGEFDEFVNDDTDDDLPISKKKKRRKGSGSEQEGEDEEGGERKKKKRRRHPKGEEGSDDDETENGPKPKKRRPPKAEKKKAPKPERLPPSMKGKIKSKAIISSSDDSSDEDKLKIADEGHPRNSNSNSDSDEDEQRKKCASSESDSDENQNKSGSEAGSPRRPRRQRSDQDSDSDQPSRKRRPSGSEQSDNESVQSGRSHSGVSENDSRPDSAESDHESGSDNEGSGQGSGNESEPEGSNNEASDRGSEHGSDDSD

SEQ ID NO: 513 - DNA, 27278 bp, Mus musculus
  misc_feature (1)...(27278): n = A,T,C or G
nnnnnnnnnnnnnnnnnnnnnnnnnnnnnnnnnnnnnnnnnnnnnnnnnnnnnnnnnnnnnnnnnnnnnnnnnnnnnnnnnnnnnnnnnnnnnnnnnnnnnnnnnnnnnnnnnnnnnnnnnnnnnnnnnnnnnnnnnnnnnnnnnnnnnnnnnnnnnnnnnnnnnnnnnnnnnnnnnnnnnnnnnnnnnnnnnnnnnnnnnnnnnnnnnnnnnnnnnnnnnnnnnnnnnnnnnnnnnnnnnnnnnnnnnnnnnnnnnnnnnnnnnnnnnnnnnnnnnnnnnnnnnnnnnnnnnnnnnnnnnnnnnnnnnnnnnnnnnnnnnnnnnnnnnnnnnnnnnnnnnnnnnnnnnnnnnnnnnnnnnnnnnnnnnnnnnnnnnnnnnnnnnnnnnnnnnnnnnnnnnnnnnnnnnnnnnnnnnnnnnnnnnnnnnnnnnnnnnnnnnnnnnnnnnnnnnnnnnnnnnnnnnnnnnnnnnnnnnnnnnnnagagagagagagagagagagagagagagagagagagagagagagagagactgtctgcctgcctgcctgcctaggatagagtaagacaaggaggaacctgacaccttccagtgtttgaggggccaaggaagaccaggagtctagggaataaagatctctctccaagacacccttagagttcagtttagtgagtttgcacgcagacatgacctagcagaggaagccagaactgggtgggctagcccctctggcacagagaagacctgaggtggtctcagtctccactccactccacgctcacacacacacacacacacacacacacacacacacacacacacacactgaagtccccaacatctagcaaggcactgtgtattctgttttgtgatcagatctacccctgctaagcctcagtctcccagtctgcagagaggtgtgaatagcctgtgaatcatcactttgggatcctctattgtttttgggtcagtcttctccattctcctctcccctccagacagaaagactgcagtgggggtgggggcaggcgtctgcttgtgacacaatggagtggtccaaggttcccatgtgttggtgaacagttggaaacagtcttgctcacagttggtcaagaagatgtcaggctcccactcaaaagccactggccctttagatactgaaacctcaatccaaagacacttctctacccaggtctcctttttcagccccctggttggaaagagagggaatatttgttctccggcaatgaatggtctgttctgatctggtcttggagttcttgcttggtctctggaaaaggccattctgagactcctgctcccacaagaggggcagtgcctcaatttatgtagaatgggtggcatctgggctccctagctccagaggtggcagtagcgatggggtaccacatctgatagaagtagtatgtggagggtctgtttttggtgaccctctggaaggggggcttgacattggggtgggggacagtgacaggctttcctttaaacacttcataatgtgctgttttgttgaatccttacagcggttctaagatgtggtgactcttagaggaactgaggcccagagaaccacagtggcttgtccaaggtcacatagactcaggacagtgccaggactgggattcaagcctgcctgtgaggtgcttggagaggatcaccactttcctggtagttgctcttggcatatctgagctcccatctatcagacttgggctggcaggcctggtaggcctggcacaggtgccccaattgagtttgtagtgagattcgcatgcccacgtggctaacaaattgcaagtgggcgtttttagtcttcttgttccttctccgcctctgagccagagatcaccaggaagacctatctcctgccttttagagcctgcagctggtcttggaaacatgtatcctggctctgaagtatctggagtagcagcacagcctggggtgcaaggatggtgaccttcatcatacttaagatgtccccaaccccctatctttgactctctcatttgctgtggtggagagcaaatggagtgaccttgtgcttaccctacccagtctgggtctctgtctccccattcttcccaacaactctttctaattctgatcattgctgtgctcagcctagagctgaggctggggatcagggtgtccctcagttctccctggaatgactggagctgtgcttttggggctgatgaaaatagctgtcttggtctccaggggctgagcccaagttatttccatccccagcccagaggtagaaatagctcagggccaggagaaggagagaggggagaagggttaactaagggttaatcttcccttctggcccagcctctgtggagccccccagctctactgtatgccccacccaagccaaaccattctgggaacttgggcctctggggatgaaagtggggccacgctgggtttctatttggtgtggtagttgctacagggaggtgcctgtgtctgccattggtaggaagcatagaggggcccaccttacagagccagcaggctcagcccctccatatactgggagagactagttcaaagaatgacagggcacatagcccctagcattgcgggcatagctctcctgtccactttccatcttgccacttgatccctggacgcttggcagcaagggcagcaggttctatcacagctttgcaatcttctgccccaactttggctttctctgtgtgtccagctgcttttttgttttggtttggtttgctttttcagtactatatggattgaacccagtcttgcacatgctaagctggtagatagagacagcagtcagcattacatccctgctgtgtgctcagcccctaaggctatcagatctttgcccctgtcctccagacagtcctcagtctttgtagacataggcaaggaaaccaggattcagaggagaagacattttagagaccctagtgccactggaatctacagccaggtctatggccttgaagctcagacttctttcctgagccaccctgggaaagacgagcactctataaataaactgcccatgtgtgcctggttggttagcacagctggagggggatggagaggcattgtgtggtcaattagaggcagggtccgagcgtgagtttggagaagggactaaacttggccctgtgcatcctcagccatgagaggggactgagagcctatgggccctgcactctgcttccttgctgctccctcaggcagcctcctcatcactgggaagggtcaaaggagcctagaacttatggctgagtgggtcctttcataggaagacttcctgaagaccagagtggggctgggctcagggctactggtaaagagttgctgttagcctgtgtggtctggatcttacccacaccatgaggtcagctgagtaggcacaattgccccaagttatggactgcatgtgaacggttgaacttgtctgcccagtcctctaccttcctgactctgtagtctcagtacacacaagcctctgtcgggttcctcacagcatgctttcggcacccaatcagccaccctggatggccttgactggacactctttgttttgagcctgagttcatctgtgacactggagaggctgtgctgtgagaacgtgcttcttggccaccattgcttaggtgagatcccaaatatccacatcctatgaggccctgaatcacatgagaggttaagtaactgttcaaggtcacagatctacttagtgacagagccagagcttcagcctaggtggactgctccagagcctggtcacatatgccacccagacctcagcaccatacccctgggtagggcctcattccccagcacccaagcctaaggaattggagagtgaactgcagttctctggtttctcctcagtctctccctacatttctgctccagtcaaccaacttgggatgatggggtcagggcttatgctgagcagtctctagaccatcctggctcattatcaattcaatgcaaagtggaggtgtgtggtcagggctgtagccaagctgacttctgtgggggaggagtagcaaccagaataagggatgaactgagtgtttttcagcaccttctgggccctgctatcctgtcttatggccaaaggaggtagtccaggtatggccgtggttcttaaaggttggtgtgggttaaatcaggcccttgaaagcagtggagtgtcaggtgtgggcgacatgggcaagagctgcctgctgcttgtctcctctccagggttggtaagctgggttaccttccagacctgtttcctttcaaacaaatattacataagtttgtttactctatactgacagggtggtggtgtggaagtcaggacaacctgctgcaatcagtttttccctcccaccatgtggattctggtaattgaacccaggccattccgtgttggtggcaagtgccttaacacttactggccctagaccaagctcttacaggttactcaactacctcagcctcctttttgcaagtatggatcatggaagcctgtgttgagagatccagcgagactcaggctggagagggatgggacatgtgagagggtccttgggaaaccacagacctgttctaggggtgactgcctagtctcagacactcttctcgatctccagacttgtcaggagggagaagattgcattcatttcctactcagactggaggagctgagagccagatctggctgcctcagccctttccttagccttaaggaggcaattagccctttcagcccctcctgcccccttaccaccggagctgctgaaatgtaggcccagtggcagccaggagggctgaggaacagaaccatgcccagttcctgctgcttggaagtgtgtgcggaataggactctgagggtccacacaggagaacactctagtgtgagtgacctacgtagttatggctgcccagaactaggaagaaagcagggagtggggtgcccttctttttcataggctctagacagctttttgtttaactctgggccttcagcctcaacagcagctctggaagctgctcttcctgcctctgggaattcccagattttccatcttcttgcttcctatagtttgcagtgcttttctgtatgatctggtacaaattagcacactctacaaataagcaaggtgcgggccgttctcagaggccctgaggctgccaggtggggaacacacatcttttgggcattgcctacatctttctggtaaaccttaagttgagcccccttccacacacgcctacactagccttcctgctaccagattggcaagcactcttgaaagggcctgcctgccgagtcagaactaggcttcagagttgggaaggcagagatgaggcagttctggcctccatccctgctttagtacttacaggccatgggacccccacaggtgacttctctcaacctgttagctcaagtctgaaagggactagtcacgtctatgggaattgaggtgagccagggtgagggatagtccccagttgaggttggcccacttctgttagggaagccagcagtgcttcgcagccttaactagtgcccagtgtgggcactgccctacttcagccccagttgccagggaaccactgggtcctttactaacctggatttctctattgatgttgcttttgttgctgcctggtgcagccactgctgaggaaggcttgtgtccagctgtgtttccaggcaacccttgcctctagaggctgcagagaaggccacgggctggaaagcagaatctgccttcttacctgccctaccccaggtgggccctgatcccccctccctctctctcagtgccctcacttggctggcagcctagctcacctgcctgcccagaggcaaatcactcagtgttttgcttcctctgcttaactcttcggggttcccataggctctgggaaaagtacaagctcagcatgacctggactctgcttgcagtcttcccagactcctctcctgcacctcccacccctaccttactaatcactgatcctaagtacaaaagagaacctccccgcccttcacacttacaggtcagacatgtgcatttcctttttaaacatttacacatggggaaactgagtcatggtgtagtgtagtgtgtacttgtgagtgtgtacttactctgtgccagtcctgctgagaactaaatgcgaattctcttttcatgctcacatgagtcctctgtaccggctccatagcctcacagacagtgaagaacaggggagggcaggctgtccccaggttagcagacggcttcagaaccaagttaagagaaaccctgccagctgggcagtggtggcacacacctttaatcccagcacttgggaggcagaggcaggcagatttctgagttcgaggccagcctggtctacagagtgagttccaggacagccagggctatacagagaaaccctgtctcgaaaaaacaaaacaagagaaagcctgcctctagactcctttaccagtagtgtgtgttctctctggcccaccttctctggcataactaatccagtctactgaagacatttcttctgcttctcatctccagtacagcacacagccagcgtagccctgggcataaaggacagcttgtggtgagaaagaggctgggcaaatggcaccatagctaaggggaggtagtggttgggggaacctccaggaggaagtgactttgaactacactctggaggaagagtaggtgttggccaaaagtgataggaggggtttctgagcagaggaaacagtaggtaactcatctctgtgacttgaaagaagcttcaagaagctgagaaagaaacctaaggtggctggcgtatgtgtgcatatttgtgtaaggaggttttcagaggtacatggggaagccatactgagggtgggagagctgactcagggcacacaaacatctgtcaggacacctaggctgcaggtactgttaaccagaggtcagaagaagagggcagaggcctcgggagatctctgggagtatgctaggggggcggtggctgaggccaggggtaaacccacagcttcagttctaggaaagaggaagcagcctaaggctggggggtggggggcaggcagggcaagcagtacaacttcctctttctgagacctctaggaccctcctcccttggggaacttctaccgcagcttctacagcagcttggatcctgctgtagctttgctagctggcttgcactcaaggaatttctgttctcattgtttgggcacttttgtagagggctaggtttttttcttttaaaaagccccccttttccccaggctctgagcacatttggtagaggcatcgggtcccatgcctgggttaggtgctgggctttgtggtgagtaaagcagaccccctgccctgactgctgactgctgtctgcttgggggacatgctgtgaacaagcaagccaacaaatacttaatgaccaccccacggggtggggggaggaaatcctgtgaccagcttcatgacaggcttctgcacaggagataaacaacccatcctgtggatgaggaaactgaggctagggaagccgggagctcaagagtcacaggggattagtagctgtgaggatgctcagggctaggagatttggaggagtggcctttgagggaacttccttctctgctggaactctgcctcttcaactccgtgtggctagagtgcctctcctccatcaggtaccctggagctggaagggctttgtgggcattaccgtttactcttgggctgcagtgttcccatttctggcatctgtcttccaggaggtgttaggctgtggggtatcactgagtgtttggccttctagatgagagaagtatggagaagggctctactgacccctcctagcctaggagagtctgtgagcttgttttcccatgggtttccagggcagtgtttcggatcctagaggactgggaggcagagactgaagcagcaggtgtgcacacgtgtgcatgtgcctgagcaggcagaagggggtgggagtaggggttcagtctggttagagagggggcatgcagccagactgcagtaagtgccaggtttgtggtaattagaaggtgcataattagaaggcagggggtgctgagtggcgggcggctgctggtgaatttgccttagtgggcccactatggcttggaggctgggcctctggaccctcactttcctccaggaagtctccggatcacttggtttctggcctgtctgcagatgaacagctttgtggcctctccttgtggctcaggtcactcagtaggtacagttagggtccgggtggtcttgggccttttgcatctggggttttacctcttacttttcatccgttgtcctagctgtctaaacttcctggggatctgaagggctgctggggctaggagcatgctgtggagacaacctgaagacttggggtttgtggttaggtctgtggtggtgagatcctttgaagaactggagaggccataggacatggccttgaggggacacagagccagggtagagttaaaaggcactggtgcagaacctggaaggcagttttctgaccaaatttaaggaaggaaaggccaagggatgagtccggagtgcacctgctgagtgttgactgccacatgtggcctttacctactctggagcctggccttccctgtctctggttttccccttagttggcctgaggcccaagaggcgcctgctgccagtgacctggagagtccctggatgatgtgatggcagctcctcccccatcccctgggtgtaacctgaacccctggccctgctaaggtctttgtggggccaggcccaggtcgggtggcagataggtttcctctgctccactcttatttccagccgggaagcctggctcccagcagaaagggggctctgtgacctggaacttcctgcaaataataagtcctctgtcaggcttggcatcaagcatcctgtgagccctcatccaatggtgtggaggagcgctaggcctgtgagcacccttgggtttcagaagttgctaatagcttgtattgaggcttgatgaacaccctatcctagcctatgaccctgaagccaggtctctgggaaatacatatgaactttctgttgtctaatctgaatcttttctgccactccaaccttgtctactagctagagactgctctagaggtagtgctgtcttggcatcaaagggagtctcactcagcctggggccagtgggctggggagctggcattgatggttctctgaaacatctcagagtgtcctctgtggactttggtgttcctaatttcctagtgcagaggcatgtctggcatataggagttgctgaagaggctccagctggctgaatgctagctatggtgacactcccaggtctgccatgacacatgggcaggaagagatgcaagcacatatgcccaggcctccctgggagaagtgtagaggaggaacaggtgacagagcgagaaggggtgtgacttttagaagtacttccacatacaggcctttgagctgggcgtgaaggattagggccttcctgtagcagaacctgcaagaattaaggcagtgtgagagtggtctgggagctgtgggaaaccgggctagaggcagtagccattttaagcccagctcagctcttccccagcttctttcctcttggccctctctggttcctttcatatacctggctgtatatggaaggggaaggaagcacttcctcctctgggaagcctgaactagagagccatcagcttccctccagtctctgcctgtaaggctggccctaaacatgtcagttctatttctgctcagacctgcatcccaccatgtgggacaaatgcttgcctagcacccagcagtagttctgtcattgtgaatgtggccaggagggagacagcagctgcctgcctggtctggctgctctcctgagcttcctttatctgccctaggtcaatgtcactccagggcctgatgatgaagcggaccttgctgtgctggcccctgtcttgcctctttgtggtgagttggggaagggtccagagaaactagaatagttggaatctgagcatgcaatcagcactccaagagtggggggaatgcaggtcctgctctgagcctcgggctctggggaacttaaatgcttgtctccttctgggaagaattcaaggccttcagacctgatgaagcatctactagtactacctggcattcggtagtgatgctgtagagacagacacaatctcttctactcatgacatccaaaccagagaatagagctttcccaagcaattcatatatgggccggagggatttcctagcattttcaggcatggcaagagggcaaggtgcttgcctcctgccagtgtgggacaggtggaggataggtggggacctgaaagaaattgaataactcatgaactggatgtaggccctatattagttgaaggaagcctcgattctggggctagagtcagagcacctacagacttgtagcctcaggcagatctgaggtctgatctgtggtgatctttctgctgtaattctggactcaggaagaacaagccaacgtctccgagaggtagcctgcagccttagcagttgttgggagccaggctgacattctaccttcagggtaactggccctggagcttcctagccctagtagctgcggccaagttggaggacagggctttcccacagtaggagtcagggcaagcagtgcattcaattgagtgggaagcaaagggaggccatccaagaggggctagcagtccatatctagaagagcgctcctttggaacgtggcatcccctgtttaggtgcaaggtatgaatggggtggccttggcacagcggaggtcacagagaaggatgtggtctcagactcagctctgggcccagaatagtaagcaccagctgcagacttggctctaggcatgataaacagaggggagttaatgacatgctcagcttcagggtgaggggaggcgtgcagcagaggggagacaatctcagaggaattcggaagcatttcctcctcgtctgtctggggtgaggaggtgtaactcatctgaaagggctgtaattcagaggctcaatggcttgaggtcctgatcctgtctggggctttccagtattttccagaagcagatataattctctttacccagacactggcagtgcagcagaactggctgaggcaggccccaaagcctgggttgggagcctgtgtagtctgcgattcatgctctgttcaggaagtaggtagtgagcagatgaccctgcaggccccatgttttaacattgtcttcctctgtcaccatgtcctctgttccacctgcattcttccagctgctgccctggcctctggccactccaacaccaataactccttggctgtgtccacctggcaaagagcctgacccagtgagtgatgtgctgtcctgtcccgggatgattcctgagggcagaggggaggcctcggcctggatgcccaggggcttctggcctggcttcaggcttgtaatctccttcctctcccacaggatccaggacagggcacattatgcagaacttgccccccaggaaccttttcagcctcatggaactcctatccatgccagcctcattaccgatgcagccttcaaaagaggctggaggcccaggctggcacagcaactcatgatacaatgtgtggagactgccagcatgggtgagcacagggtgaagtggggcttatgctggggtcttgtcccactgctccctcagtgggcctctttccatctgtgacatggatagggggaccgttgagggcacttggtaggaaggaatccaatttttcctaaggacaggtttttatctctggacctcagtgacatcttccctccctgcaggtggtttgggccacagggagttcctcatgttccgtgtcagccatgttccaaggcacctccaagtactggtggctgtgatggtgagtggtaggtggtggggtaggaaaggaagtcagggcacttgagcctaggagtgcctgcagcatccatgtagggaagtggggtcctcttccagcctataggggaacaggcagccagaaatcgttcagcagtatatggccagccaccttcctgacctttgagtagtagagacaatccagcatcaggcagctgccattattaggatcagagttcatatcctgttcggtcctattgtccctatcctttctgtaagaaccctaaagatgcatgagccagccaccccttgaggctattaactcatgtgctcttgtgagaaggcgaaatcctgtgtccctttgcccaggagtgtaccatgtatgtgtatctgcctgttccatacacgtgtatgaggggcagatgtaggctgaggcccaaggaagcctcactggatagtcgactggatggacaaggaagagtggcatgagctggcctttgtcttcttacacatatgtggcagggtaggctgtatggggacttcagttttcccccagcttcatgttcagattcttggacgtgctgccactattcctgctcccagccttctatccagacctagctggggctcccaaggcagggccagggcaagatcgccaccatcttgtctgtggtgaagtgggcagatgcagcaggtcaggcagagagcctttctggggctgagaaggggtgctaccagcccagcaacttctttatgtttttctctgcttccttgctttcatcccgtgatgttcagagtcagggcggcggggccggcgtggcgtcgaagtggcagcaggtaccagtagcaacggtgaacctcggcagcccgggaatggcactcgggcaggcggtcctgaggagacggctgcccagtatgcagtgattgccatcgttcctgtcttttgtctcatggggcttctgggcatcctggtgtgcaacctgctcaagcggaagggctaccattgcacagcccaaaaggaagttgggcccagccctggtggaggaggcagcggtaagcccctgctgggtcgacatggggagactaggctttagagggacccttcatggcctgggattgacaggggagggctaatcaggaaggcctcctggaggtgctgtgcagcggccttgggcaacagtgacggctgacaaggatggtgataggggctgcactatggcaatgggcagaggtaagacagtgagtgtgtcaagtggagttggtaagattcctgctctgggtgaggccctgctccaccataggattgagactctgtaggggccacaggctatagttgtttggttcaaaatgacctgtggcctctggtctgaagcatgagagtgccctacatcaggtggggctggcagagccactgctctggcaggcactacgcagggttcaggtttcagctccactgtagttctagatacaagtactggaatcagagggagagggccttgagctcatttcttctcttgcttaccaatgcctcaaagtgtagagatctcatggacacatatgcactgctctgggccgtcaggaaccttatggccaagtcaagagaaatacaacatctcccatgcttgctcccaggaccccctccagctcctaaccctgaatcatggagtgagcgggtaggaagatagcacattagggccatttgactttggactgtacttttgctagtctagcgaccttaactgctgcctgggtatacaattttggaaatatgcttactggcttaggacccatcacaacggcccattctcacatccttgatgtttaaacccaaagctgttaaatagtttcctggacaggatggtgtgcagagaggtaataggcctggagaggtgttgagagttctgagcatggagggcccatagctccctaaggccaagaaaggtccagtgactatctgggagagactggtgcaatatgcagggatatggttttcagatggtcctgagaccactgagcacttggagtttctgggtgcaggataacaaagatgacagcatacttttttgagtctaggtagcccactggtaatggacttagttagctgtcttgtcacctgagcgccacagtagattttgctgcaactcaaagtaaggtctgtggcgccctctgccagcagatcctggtgtagcctggagtcccatcttgcctagaaccacgggttcctttttttttctccagggattaatcctgcctataggactgaagatgccaacgaggacaccattggagtcctggtgcgcctgatcacagagaagaaaggtaaagagagagtctctctttcatcctatgcctgggagcggaaggtcttttcctagagccttagctaatacttgggggaatccctgcccagctctgcctccaaagcctcagtttgatgggggctctgaccctgggtgctgcatttttgcctttgatcttgactggtaagggatggaggaagggcacatagtttgggccctaggacagggatgtgggagtaggcaggggctatccgctgagatgggtgggatgctcctgtaatttggagctaggttctgactccacctgcccacagagaatgcagcggccctggaggagctgttgaaagaatatcacagcaaacagctggtacagacaagtcacaggcctgtacccaggtgagggatggggcccttagataattagcttacctcctggggatttcctcttgggtctgctccctttcatgccacctttgttcctttccttgatgggctatccttttctggcttgctccagtgatcatttctgctcttcctcctgcaggctgctgccggcctcacccagcataccccacatctgcccgcatcaccaccacctgcacactgtgcagggcctggcctcactctctggcccctgttgctcccgttgtagccagaagtggccagaggtgctgctgtctcctgaggcagcagctgccaccactcctgctcccacccttctgcctactgcatccagggctcccaaggctagtgccaagccaggacgtcagggcgagattaccatcttgtctgtgggcaggtaaggtgggcagacatagagttgtggaataacttgaaggcctggatgaaagcaagtctgtgggttagcttagtgctgactagcctttcctgggcatctctgggtagtgtaggtggccaaaagggtcatcatttcccagctgtgctatgtcacatggagctcttgggtccctgaggcacacacagtcttggtgttatcatacccgggacttcttagaccaagggtctgtctgtacccctctaactagatgtggggttgctgggagctggatacaaatagctggggggctgagaaggactcctgagtagtctaacaggctcaacctgtgtgatcttggaaattgcagggtgacctagtaggagctgccttctttggcctgggtttcccctctgatgaggggtgttggtaccacctctccctataggttccgtgtggctcgtattcctgagcagcggaccagttcattgttatctgaggtgaagaccatcacggaggctgggccttcagagggtgatctccctgactccccacagcctggtcttccccccgagcagcgggcactgctgggaagtggtgggagccatactaagtggttgaagcccccagcagagaacaaagctgaggtgagtgcttggagttgggggggggggtagcacctgggtcaaccctgacagaagagaggcccatgaaggcagtggcggcctcttgactcagctctgaccctttaatcctgacccccaggagaaccgctatgtggtccggctaagtgaaagcaacctggtcatctgatgggctgtctagaattagacactctgccctgtcctgggaggttctgaaggcttcctgcaggagggagagctgcagctgggactgaggaccaagatgcaaaggccaagtcctggaggtgggaccgtccgccccactgaggaggcagcctgcggcacagcacgtgagcaggagatcaagagcccaccctatccctgcagtcccggttacttccatgcagggtgctgtaaccctgtgcctgccctgaacacatcataggagccctctgtcccttagaggtctggtttggtggaggagtggtatctgtacctggccccaagcttgtgccttgggaactagccactcttgcccatgtcctggaccctggatgtgactccctctcttctggcaggccctataaagggaaggggtagcaaagagccctgtactggtggcagagtacctgggttccaatcctgggcttatccctaggtacgtaggggaggagaactcagttcccaggacctctccagctctttgcagattctgggctgagtcctgttggggggagcttgactttgctaccctcccattagtagctttatctggcctgtttttgctgcttcctgggccttggccttcatggctcccatgggactgtctattatggtgatgccttcagaaggggtttaatgcatgtgcctgcccctaccctgctatttttaatgaaactgaaaaatgacttgacttggacagggctctctggtgcagagcctcagtccaccctgctgccctcaagctctggagctgtgggaagaggagacaggcaggctagggagtgcctgtggcctgtggttttcaatgcccctgtggtacagtatctgcctgagttttgggtagcaggggtgactgccaatccagcctgtcttagtctctgctctggctcagtgcctcgttatttatgtggggccgtgcaggcgcggggcccactgcccatcccatttcttatttattgaaacctgctgttgccctgcccctacatctccagccccacacacttgagtaataaaaggtggaaaatgtcgtcatgaggtgcttcctttccccgtatcctctctgaaaactgctcacctccagggccctgccaggtgtgcacacatcgtcctccccctcatcagcaccttcctctgaaaccagggaaataggcagaggtggctcctcgtctcatcctcaccgaggtccccagaggccaggttccccaatagaaatacaggctgagccatatgtgtgattgaatgtgttcccatagtcattccaaaaagttgtctaaaaaagggtaaacttagtatttttaaccaagtatatccagaatattttcattgcaatataaaatcattatgaaaattatgaacgagctttttttctgtttagaatcttatatatttttttttttatttatttacttattatttatttattatatgtaagtacactgtagctgtcttcagacactccagaagaggacatcagatctcattacgggtggttgtgagccaccatgtggttgctgggatttgaactttggaccttcggaagagcagtcgggtgctcttacccactgagccatctcaccagcccctagaatcttatatattttacatgtgttgacatgaactaattatttcaagggcacaagaagcatgtggtgagtgggagtggccacagctggagaggaagcagcagttacacagaagctcacagtgtgggaggggtgtgatccatgagatggggacaacatgtgcaaaggacagaccaggaagtggctggaggggcctcacagtggttaggaagaggcaaagcctcggcctgtttggtcacaatgcaaagcagaaacacccagaacaggaagttgttatagctgtctgggtaacaagtaacagggaaacagaaggacccaagagattcctagggcagacctgctggaactccttctgggatgtgagatagggaacacctaatggtgtccaaggtgttttgatatgaagccctggagctcttaggagacagatctgagtgacaagaatatcttacactcagatgggcatttacaactaggcagagagggtccatgttttagggcagatcccagggcctgcagtaagaagccatcagggtcctggtggccaagaatggatgtagaatttggggaaagttggctgagaggctaggaaggctgtcatgccccagggaatggacagggtctttgtgagtttcctaagggatgtggtgagagctggaccaataccaggtaaatcaggagacaccatcccataccaaagttgccatggccagtgggaccttaagttagggttttgtcagtgtgtggtacactatttaacatgggaaggagtgacacatgcaaacactactggagctagtagtggaagcctagcctgtaagaggagaccaggtggcttcactgaggacagaaatctgggcagaaaccaaggtaggtggctggcctagcagtggcaggaaaggagggaagaaaaaaagccactgttaacaaatgggcagacattttaaaagcccacatatccctgcttcttcccacatcctttgggtataggatactctgggacttttgtgaactgggagtagacagggtctcctgtgtgtccaaggaaatgatccctatggctgcaggatgcagcacatttggcatccatttacttcatgtatctcagggtttggctattctaatttgcctatcccttcagccagccaactcatggaccccacttagtacttaggatttggataacagccaattgggtggcacgtgaagataagagtgtgtcctggagagtgaggcaggaggtggcatcccagccattctctgggaaagctagattagagacacattcagatatccgcagggtggagacaccatgttcaggcttccaggctggttaggagatctctctcactataagcacttctctaccctgctcctgcttgctgagagaatggcttgtttcatttgcttcttgtgtcattaacctcccaacatcaaagatatgatgcaggtgtgtgatatttttggtctccacagcctcaccttcccttggaaacgttcctacaaatccctgcagctcttttcagtgggtggaggtgggagttggagggaagaacaagtagggtccaatctctagctctctgcccacttctagaaaatagccctgccattgtgacatagaaatgagcctaagatgttctatcctgtctcagataaggtatcctctcctcccttaatcaggcccacaatggatcatggtcagaacgaaaggctgggaggatgtcaggaggggaagtgaggcttggtgtaacactttccactgtagcacagcctaaaggagcactggtccagcaggtggcctctggcaatacacgccccatggagggttagggatgggactcagggccttatcaagctatgcaaacctgctgcctctgtgctggagccccatccttggaaagtcttaaaacattattgaactaatgcaactgagttgactaaccacagggacacatacctaacttcaacttctggagtgatcacttttgggcacttttattacagttgaggatgctgagcttttggcctattaactgtggaacgagaactgtgagggccgcaccctggaaaagaaaagtgattggatgcctaagaagtgtgtggtagtttgaatgagaattatccccataaggctcatttatttgaatgcttagtccccatttggtgcaactgtttgagaaggatcaggaggtatgccttgtttgggggatgaggtttcaaaagcatttgcctcacagggcatcatggtgcacaccttaatgttagtattcgggaagcagagaggcagttgtatttctgagtttgaggccaacctggtccacaaagcaagttccaggacagccagggctatacagagaaacccagttttgaaaagaaaaaggaaaaacaaaacaaagatccaaaacaaacaaaacaagcatgccatttccatgtagctcctgtgtgcacattctctgtctcagtagtatggaaacttgaagcccaaataaactcttcaataagttgtcttggttatggtgcctttgtgggaagccacatgtgccgttgctgagtggcactgactactgctggccaccacgcataagattggacaaacaaccaatgtgtacatatgcagtaaagttttttgcaaagacactgcctggcccaggcatgataatgaggttctgtaaggtactgagagtataaccaatcagatgtgagacatgcaaatgaggttctgtaaggtactgagagtataaccaatcagatgtgagacatgcaaatgaggttctgtaaggtactgagagcataaccaatcagatgtgagacatgcaaatgaggttctgtaaggtactgagagtataaccaatcagatgtgagacatgcaaatgaggtatgataatgaggttctgtaaggtactgagagagagtagccaatcagatgaggaacatgcaaatgaggcttagtgcataaccaatccgggtgtgagacacgcccctcctaggcctataaaagcagcaccagttctgggctcgaagtcttttcgcctctacaatcaagctctcccaataaacgtgtgcagaaggatcctgttgcagcgtcgttcttcctggccagtcgagcgcgtgcaagatgccttcacaaaagaaaagtaactaagacaaaaagccttggcagcattggcagtggatcaccctgaagggacagcagattcagtgtacaggagaggggaagaaaaaaaacaaaaaaacaaaaagaaagagtccttaatgacaggcttgtatgaggccctgtgggtttgtagtaagtcctgtaataagccacctagctcctcttgatttcctgacactccctcactgctctgaggagaggaggagatcccgtctcttaagaaactacctcctctgagatgggcctgcattctggaaccagaccaaggatgaattccaacttcaccttagccaaggcccttacctcccacgtgggacaaagagcagagcttcccctgcagcaaggtataaagacctcaaaggtcaacacgcagaggtgagcagcaagccatccacagccactcaagaaaccgcagggttttgttaccgcttccccctctttttctttcttttggtgctgggggggtccctgctgcacacatataccactgagctatacctcagcctcagtagaagccaggcctttaacagcttccctggatctccatcgtattatatgatccaggcgctgaacttaccactccacagctcccatccactgcgccccctcccaggccagagaggacatggaacactgcaatgcttgatttctttcctgagatcatacgtgcactggtgtataaatgcctatgtgtgtatgaattttatgtgtatgaatggtgtttccaaagaccagaaggcagcacggtatcccctgagttatagactgttgtgaaccactatgggttctgggactcaaaccctggccctttgtgagagcagcctgtgctctaaccattgggtgtatcctcagcctttgagttacaatcctaccccagcctccgaagtactggggctccaggtgtgtactcacaacaggttaaaaagcagcttagaatgccctgggggaggagcagcgcagggactcactggctggaggaggtctgtgcctccctcacccaagacacacgttttggtttttgttggttttttttttttttttttggaaactttcttttaatagttgttgaatgttctacagcttacagtaaatatcatagttacaaactcttggcttcaaccattcagagtgatcactatctgatcttcaaaacaaagcaaaacccaaaggaatccaaaacaacaaagccagatttacacttcatacacacaagcgtggccacagggctttccaatctttacactccaggctgtattttgaaaacatctataaattatttgatcaaactacttggaagacactggtcaaaggtttattattataattattattatttttaaatgttttttatttgttttaaaatgtgagttccaataaaatttaaaaattagattccaacctgtaggttaaaatgaattaaaaaatacaaaaatcatacacaacgctctcttcacagggatggtccatgccatgagaacaagcttctctgtcatgtgctatgaaagaggggtgcagatgccttgaagacaggaaggggacaggccctgggccttcaaagataaaagacaactccaaggtgcaggaggcctagccttgcatcaccttgtaaggagcttggttcacaagacagatccagttgatctggctgacctgaggtctctgggccagtcctattcttcatttagtctgactttcatgcatgaggaggatggctgagctggggtctaggacagaggatgctagggtcaaacccaaagcagattcctgtgggctgctgctatctgtaaagctgttttaaatctgttctcttgggaaagaaaattgtccctcaggctggaaaggataaagggacacactgccaccgcagggctacctaagggctaccgaaagcagcagccacggtaaggaaagcaagtgctgcttgtcttctgtgtccctctttgactctgtggccactagtttcaactcctatattcttagctggccttctggctggcattaacagtttataaattaggaaatacccacaggagaaactgagagtgggacccaagtctaggtcaggcgagtttggccatggaatgttgaagctggcctactgggaattttgaaagctgagccctggaaccacataatgccaaatttcacaatttttttttttctttttttccccctaggagagcgaacaggggtaggaaaaggacaaaccttgctgccagcccggcatgtccacagaagtctgtctagaggctcaggtgttgtctgagcaggaaacctagccaagatgcttccgctgctttgctctcctttgtccactccaacccaggctgccctccttctctagtctccctagcttgacaagatacttggggccacacactcagcagtcatgtagttaactcaagatggaaaagcagagctcactgaacatgagtcacacatgggatgatgactgattctgccagaacgctgtgaagaccagagcccatagcaggggcaagatatctgatatgcagggaactaagcctggttcagccaatgccttatctgatgtgtcatgtctgcacaatacagatgccagaacttggtgaccaagggatttgtgctacttgtatgctctccatgactcatttctgaaagctatttagaacagagcatcaagccttccaaagaaacactgctaggtctcaaacgtagaactgccctgatggccagaaagcactgggatacatgggacacaagttagtttctggttctcaaataaaccttgtactccagtccagacatgctttcagtagttcaggcttataccatgccccgttaacgtactttgttggatctggacaggagccagatggacagattgtgcaggctttccagaagcaagactctttgttgaaagatggacgatactgtcctcaattatcttcagtactaggcagttgtcaccttcagtgtcctgagttaggtcttttgtggcaaattcctatctgtactaccagctggatctatctatctctgggtctccagggcccattataggtcttggcccaaagcagaaattcttaaaaatctgctcagctgatggaccggagctccccaagtcttcataaacgcttctgtgtggggtagcaagtaaccccttctttcttcaagcaagcttacactcgagatccagtaggaggcagcaacaagagtagaggatcagaagagtctaaatcttggctctttcactcatgagctatgtgtcctttggcaagcctgtgaccccttcatagcatcacgatgcataccctgcctcctatctttagaggttttggcaatcaaagtcaaagtactttacaaaaagaggtctggacagatagatgtgtgtccctgatgaatattcagggaagggggtgcactttagggcattcctgggataacgagaaggaaaacgtggtttatcttataggaagaaaaatagggcttttgtttgttttttgttttgttttgttttaagcatgacaagagactctcaggctttcactaactgtgagtagtccagtttccagacttcctggcccagggtggataaaggtgaacaaatggtgataagggaggctggtgaacagaggcacctctccttcaggcacctctccttcagcactgcactggggaggggaaaaggtgtggacaaggtgtctgtgtgtggtgatgccagtgtggcagctcatggtcatgtgcacacccctcatcctatggtgaggggacccttccagctctggcctcctctgtcttgaccactgagcctccagactgtttagatgatacctagagtattcctgccagctacgtgtcaccttgccagctgtggtcacataaccccctgtgccctagggctcagtcccttcactatgactccctaagcttggctagacttgtggaactctatcaaacaaaagggtgaggccagcttttgtgctcttactaaaaagagttaatgggtctggttcttctagactacagcatgccaatacttggttttcaccttgggacttttctgctcttgaatcccagatgaggtgcagagcacagatgcttcagaacatgagcctatgtttggatcaggcctggagagaacagcgccagcagggggttccttaccagaaagtccctgtacttttcggagccttggaacctctatgaattaaatagcaggctccatgccttcatctgtcagggctaacccacatgaacagtgaggggtgcaaacagcttttatttactggtgtagaaagaacaaacatgaaaaggccactcctgggtctgtgttttcctctgccaccaggtcacctggagaccgtggggtctaggtagcctgccaggatcccagcagtgagctcactttgggccatttcatttctccttagaatctatcgcatcacttgtcaagtgagtggaataaccgaccctgttgcttgctctcagggtcagtatattaaaggtcatgaagtgctttgaaactaatgaagcacctaacaaatgtaacctacaattaccaccacctttatcagtttggcattttttaacatgttagacatgatctctagcaaccttcatccacctctacaaaaccacagaggacagggagaggtgttataagatcagattaacactggaaaactttgttttaaaatgaaaccttgtcagcaccccagaacagctgagttttcctggtcctgaagttcctgggagaccaggaaggtagcagccttaacttctggctctttgccacagacgctgaagaactctgaccccctggggacagtcagactgtttctgaggtcattccagctcagtggtttcctttttttttcctttggggggacttgggaaataggaaggtgatgtccaagtttaaaatgaatttaaaatgaaaataattcaagtctgaaatattaccagtgatccaattttacacagtaaggtattcctgttccacccagggaagatgtcggctttgctagctgtgcacaggagggtggctggtcggggtccctcttctcccagatgtgactgtatctgcttggcctcattcatgtgcacctctctgggtggctcccactcttcctctcttcttgggataaagagctactgtcctaagtgcacaggctctccttccagtcagcccacctactccttttcctggagtggagtcaggttcaagatgaacattccagatgtcttcataggttttccaagtgtaatttctatttctgccgcctgctctatgtggcctctcttagcccccacctttggagtccgtgggggaacagcagaaacaagcccagaggtcattacagagctcaccagatgtggcactgctgacttaattcttacaaagtcaagccaatccatccctagcaaaatttttgtaggtaaaatgccagtagtaggacggctgcatttaatgctaatttacagtgaggttcagagaagtcctttctgcttctctgggcctcagtttcctcatctgtcagataggggactgggtgagatgatggatgctaaggttccttcagttccatgagtatgaaatgattattgctattgttttccttcactatcctgaccttcagaaccgccagctcccacctggaatgtggttccttcactttggccgtgacatggcacaaggtaaccaagagcttggcctgcctgccagccccacagacagacgtgtgcgtccggcacggggaagggcagaagggcaagggagagaaatgccaccagttcctactctcatcaggaggaagcgcctcaggagaggtcctcgaggctcaggctgggtgtgggattatgcgaagcctctggatgctggtatcccagcacatgcagctgtttggcaggtctgaggtcaaagcatctctgaaggaagtgccaggtcagttaacatcactgtgcaaatcagaaggtccaggcccagcagtggggccggagacctttcaaaccagagctaagcaccctcctgcccttcttcacactacctccctccccagtgtcttccctccctccacccttccccaaactctctgctttcccaggttctgagcctggggacatgaagctgctaacattcctacataaccaggtgggtttgttcttggtctgttgtgatggttcttagatatttctttctttttgaactaatcttgcttcagaaaatgacaatctgacagagatgtggccttctcgacagcttcaagtccctactccacacggagggccacatttgttctgctctccaaacgaatctagcctttagatgaaccatcacaataaacctcactctctgcttgctactagaccggggtcccagggacaggatgctgagggaagggaagaagcagagaggactgggcctggctaggtaggaagaagggctagagcagaagggtgtggctaagagggaggcacgaggggaggctcctaggagattagaaaaagcagcttttacaaaaaccaaaaataaaaatcaaaaccattaaagatgcataaagtgacccttgcacttccgttgtctcttcttgcaatagaggtggtgctgctaggagactgctcagcaccggtaag

SEQ ID NO: 514 - DNA, 2472 bp, Mus musculus
tgccctaggtcaatgtcactccagggcctgatgatgaagcggaccttgctgtgctggcccctgtcttgcctctttgtggtggtttgggccacagggagttcctcatgttccgtgtcagccatgttccaaggcacctccaagtactggtggctgtgatggtgagtgagtcagggcggcggggccggcgtggcgtcgaagtggcagcaggtaccagtagcaacggtgaacctcggcagcccgggaatggcactcgggcaggcggtcctgaggagacggctgcccagtatgcagtgattgccatcgttcctgtcttttgtctcatggggcttctgggcatcctggtgtgcaacctgctcaagcggaagggctaccattgcacagcccaaaaggaagttgggcccagccctggtggaggaggcagcgggattaatcctgcctataggactgaagatgccaacgaggacaccattggagtcctggtgcgcctgatcacagagaagaaagagaatgcagcggccctggaggagctgttgaaagaatatcacagcaaacagctggtacagacaagtcacaggcctgtacccaggctgctgccggcctcacccagcataccccacatctgcccgcatcaccaccacctgcacactgtgcagggcctggcctcactctctggcccctgttgctcccgttgtagccagaagtggccagaggtgctgctgtctcctgaggcagcagctgccaccactcctgctcccacccttctgcctactgcatccagggctcccaaggctagtgccaagccaggacgtcagggcgagattaccatcttgtctgtgggcaggttccgtgtggctcgtattcctgagcagcggaccagttcattgttatctgaggtgaagaccatcacggaggctgggccttcagagggtgatctccctgactccccacagcctggtcttccccccgagcagcgggcactgctgggaagtggtgggagccatactaagtggttgaagcccccagcagagaacaaagctgaggagaaccgctatgtggtccggctaagtgaaagcaacctggtcatctgatgggctgtctagaattagacactctgccctgtcctgggaggttctgaaggcttcctgcaggagggagagctgcagctgggactgaggaccaagatgcaaaggccaagtcctggaggtgggaccgtccgccccactgaggaggcagcctgcggcacagcacgtgagcaggagatcaagagcccaccctatccctgcagtcccggttacttccatgcagggtgctgtaaccctgtgcctgccctgaacacatcataggagccctctgtcccttagaggtctggtttggtggaggagtggtatctgtacctggccccaagcttgtgccttgggaactagccactcttgcccatgtcctggaccctggatgtgactccctctcttctggcaggccctataaagggaaggggtagcaaagagccctgtactggtggcagagtacctgggttccaatcctgggcttatccctaggtacgtaggggaggagaactcagttcccaggacctctccagctctttgcagattctgggctgagtcctgttggggggagcttgactttgctaccctcccattagtagctttatctggcctgtttttgctgcttcctgggccttggccttcatggctcccatgggactgtctattatggtgatgccttcagaaggggtttaatgcatgtgcctgcccctaccctgctatttttaatgaaactgaaaaatgacttgacttggacagggctctctggtgcagagcctcagtccaccctgctgccctcaagctctggagctgtgggaagaggagacaggcaggctagggagtgcctgtggcctgtggttttcaatgcccctgtggtacagtatctgcctgagttttgggtagcaggggtgactgccaatccagcctgtcttagtctctgctctggctcagtgcctcgttatttatgtggggccgtgcaggcgcggggcccactgcccatcccatttcttatttattgaaacctgctgttgccctgcccctacatctccagccccacacacttgagtaataaaaggtggaaaatgtcgtcatgaggtgcttcctttccccgtatcctctctgaaaactgctcacctccagggccctgccaggtgtgcacacatcgtcctccccctcatcagcaccttcctctgaaaccagggaaataggcagaggtggctcctcgtctcatcctcaccgaggtccccagaggccaggttccccaatagaaatacaggctgagccatatgtgtgattgaatgtgttcccatagtcattccaaaaagttgtctaaaaaagggtaaacttagtatttttaaccaagtatatccagaatattttcattgcaatataaaatcattatgaaaattat

SEQ ID NO: 515 - protein, 357 aa, Mus musculus
VNVTPGPDDEADLAVLAPVLPLCGGLGHREFLMFRVSHVPRHLQVLVAVMVSESGRRGRRGVEVAAGTSSNGEPRQPGNGTRAGGPEETAAQYAVIAIVPVFCLMGLLGILVCNLLKRKGYHCTAQKEVGPSPGGGGSGINPAYRTEDANEDTIGVLVRLITEKKENAAALEELLKEYHSKQLVQTSHRPVPRLLPDSIPHICPHHHHLHTVQGLASLSGPCCSRCSQKWPEVLLSPEAAAATTPAPTLLPTASRAPKASAKPGRQGEITILSVGRFRVARIPEQRTSSLLSEVKTITEAGPSEGDLPDSPQPGLPPEQRALLGSGGSHTKWLKPPAENKAEENRYVVRLSESNLVI

SEQ ID NO: 516 - DNA, 41079 bp, Homo sapiens
  misc_feature (1)...(41079): n = A,T,C or G
gaatggcactagcacagaaaatggactgataattagaaagtgaaacagccgggtgccaggcgcggtggctcacacctgtaatcccagcagtttgggaggatgaggtgggaggatcgcttgagcccaggagttcaggacccagcctgggcaacatggtgagacaccatctctacaaaaaatacaaaaattagccatgtgtggtggcacacacctgtggttccagctgctcaggaggctgagctgaggtgggagactcacttgagcccagggaagtcgaggctgcagtcagcagagattgcaccactgcaccccagcctgggtgacagagtgataccctgtctcaaaaaaataaaaataaaaatatggccgggcgtggtggctgacacctgtaatcccagcactttgagaggttgaagggggtggatcacctgaggtcaggagttcgagaccagcctggccaacatggtgaaaacccatctctactaaaaatacaaaaactagctgggtgtggtggcgggcgcctgtaatcccagctactcgggaggctgaagcaggagaatcacttgaaccagggaggcggaggttgcagtgagccaagagtatgtgccattgcactccagcccaggcaacaagagcaaaattccgtctcaaaaaaaaaagtgaaacagcaggaaatgaggtacatcaggaggccacaaccagaaaagtcttgctttggcaggacaagaaatgatattcccaagaggaagtggctgtggaaatcaggaagcaataaagcctcgggtcaggagttgtctgggttcacagaagacttaagctacctgggaaagggctgttggaagtaggaggcttatttaatgcaaggacgttgcgtgcagtaatcaagagagatagaaagtggcatcttacagggcacttacattgtaaaaagaaaaaaatcagaagtggcgtcaccttgggaaattatgtgactcctgactagagattacagatgggacataagaagtctggctgccaagaagtgggcatttctttctaaataagttcctagctaacagaaagtgggattcccccataggaagtgtgcacatcttccttcctatcttctggggtgtgggaattcaggccccgatgggacagtgaagcctccattcgcccccaagctgacagatcctcccctctgcccccaggccccgagaagctgccatcactggagcaccgggactccccttggcaccgaggccccgcccctgccaggcctaaaatgctggttatcagtggaggtgatggctatgaggacttccgactcagcagtgggggcggcagcagcagtgagactgtgggtcgagacgacagcacaaaccacctcctcctgtggagggtgtgaccctgtctgccgtggcccaggactcgcccgcccacctgccttcagcctgcttgcctctccctagcccacacgcagactttgaccaggagtatccagccaggggcacacatgtgcctgcgtgggctctgccttgtcttcgcggaagcattcctgatggaacacccactggccagccaggccatggcttctcccgaccctctggctgccccggtgcttccagtcatgatcgggtgggggacatgtgggctgaccaggacctctgaccctggagcttctaccaaagacacagctgggtctggaccccacggggctggggagggccatgtgcaatatttggagggttttctggagggcagcaggaaggctggggaattccccatgtacagtatttatgtttctttttagatgtgtaccttcccaagcacttatttatgcagtgacctggtcacctggggtgggggtgatttgaggaaatgacatgaggaaaagaaacctattcctgccctggggaccaccctgggactctaaccaagccttcctggagggacccatgcgcccctgagccccattccattcatacagacacacacgtacgcacactgcatgtccaaggccctaaacattgcccgttgacataaactttccagggccccagcctgatggggctgccctcagtcctctagatcaagatgctgactattagggggcagtgattgccatctggggacctgtcaggctttgtcatttcccagtttgttggtggtgcctttagtggttccctaatttgggaacactgatggggccttggacagggctttctctcaggtaggagaaatgggcccatgatctcctcacagtcgcccccagtccttggccctgcttccctgtgtctcatgcactggcacatatggtcaccttggagggcagacctaggagcccctctgaccactgaatccgtctccacaccccttctgccaagggaagccccttcaggaaggaccccccaaagctgaggggctgaatgtagccttttcaacagagaaggctcccacttgagagcagcctctacctgaccccctggaccacagagagccactctgaccctcagccccctcgcttcttcagctaaaactccaaaggtttggtttcagatggggtttgttttgttctgtttggttttggttttgtttggggtgggtgggtcattgcggtcttagattatgtttctcttgctaccaaacagtcatgtattaactctctttggatgatgaagtttaaagagtcaataaatagaaacaccagatgactgcattggtggccacagtggcctcctgtcagcaacctcagggctcagtctccctggccacatgggccttccgacgtccacacacttgggaagaagggaggccttggagacccagaagagtgctggacggcgaggttgccacgatttgctgtgttacctgggcaggtggctgggctgcagtttcctcatcaggaaaataaaggggttgtaccagttcagtgctttgtaaccagggttacatggtagaatcccttgcagatgacatgtaaatgcagaaacatgattcgtaacttatttacgtattaattgagagcttctgagtcagtgggcctggatggagcttgggaatctgaagctgacatgctccaggtaaagagccaggacccctgttgagcctgtctacggctcctccaggaaacaatgttctccagcaaagcctcagctggagaaccctgatgaaggccaaggccctgctccaaccctctgaagtgtttggagcagggatagaatccaagtctgtctgatttctggtctgaagaggtctgtcattaaatcagacacaagaacgcacaggcccagcaacatgggactattctgtgcaaggacagagagccctccagaccagagtgcacctgcagaactagaggtggccatcactagaaggcatgtcgtgcctcagctctgctacacgcacgaacgtttccagcctaaatgactgacttttgagtcagcccctgaaggggcatgcaagctcatgctctgcaaactggcagcacacctctcaggggtctgctgggtcctcaacaccacaggacgggcatggaccgtctccgtgcagcatcattttactggggctatctggggaggaagggattctattaataagcacagatatattatggagtaggaggcatcattcatgtggaatatataacgaaacaaagcattagaagaaacacaggctttgaagctggacagaccttgtttgagatcttgactttgccgctaactagctatgtgcctttgggcaagttgtatcccctctgagcctccatttcctcacgtgtgaaatgaggctgatgatcccttcccgaacaggactgctgcttggcgtgcacaggtctttggattgcaagaaagagattcattttgcttgtgaactagaagggtgcttattagtgaagatgtgagctggcagcaaggagctgtcacagggcactgtggcccagacatcagagctgcatctcaggacatctggcctctccacttgagtcgccagtgcctcccacactgccagtcagttgctgttccactgctttccagcttctgctgcctcagggcctccgcctcctccactcggaggaccctgggcagacttcagttttagcacaagatacccaagaccagatcctcaccacttccccgactcaagtgcctcagtaagaatgggcttggcccagcccactgttacttagaggcccacattccagggcactggccagcctgtggacagcccggaccccatcagctgtgggcagggaggccctggaatgagcatcagaccccaggctcccggcccaggggaggctcctggaaggattacctcctctgaagcagtggttctcagcctgggatgcacattatgatcatgagggcctaggccaattccaagccaattaaatctgaactttgagggtgggacccaggtgtctatatgtttttcagaaacctttagttgaagtataacatttatacaaaaaaggacataaaaaaggacccagcgtgatgggtattcataaagtgaacacacccaggtcaaggaacagaaaatctcatcaccccagaagctccccttagacctccttctggtctgccctccaagggtaaccaccaccccggcttctgacaccatgatctagcttcaccagccaaggtagagaactgctgctgtaaagggaatgactatggttagccactggtgtgggggaaagtggggcttgggtttgatgttaagagggaacgccagcctggccaacatggagaaaccccatctctacaaaaaatacaaaagttagccaggcgtggtggcgtgcacctgtggtcatagcgacttgggaggctgaggcggagaattgctttaacccaggaggccaaggttgcagtgagccgaggttacacagcaccccatcctgggtgacagagggagactctgtctcaaaaaaaaaaaaagaacagctcaaaccaaggcaaggaggggtagaggagcctggtgcaggcccaggtggatggggaaagaggaaaaggcaggggcgcctagattgggagctcccgtgagcgtgggattttgttctttgttccatccccaggcctgccacagtgcgtgacacacagtagatgctcagtaaatatttgttgaattaaatctggagaattcaggtgagaaccaactctaggtcttgaatgccacgaaacaataaacccagcttccacttagtgtttgctgcaagccaggagcatggatcatctcgaatcctcacaatggtcctgggaggttgataccattattaccctccttttcagatgaggaaactgaggttcagagaggttagatgccttcctcaaggtcacctaaccactaattgatagaacctggaatctgtctgctcaggtctctgtatctcatggaagaggagggctggcctggtgtggctggaggacaggagagacagcctgagcacccagagtcacatgtagtcactcatgaggctggactaatgttcccttagaccagccctgggaaggggatccagatcccagatgagtgaggagagtcaaagccagaggccatctcctcttcaagggagttctccaggtggtcccttgggtttgggacaggggtcagggtttagctagaccatctatctaatggaaaagatgaggcacagagagggtcaggaacttacctgaggtcacacagaaaggcaacattgaggctgggggtagctggggaggagagcccaggcaggaaggtttcctgtggtcagaaaagccaggaaatgacccttaaagccaggggaggcagaaggctagacgagctggcctccaggggccccgtcacacacctcaaaccagcctcagcactgggctggtccagagggcttggagggagcaagtctggctaaggccttaccttaaaccttctgggcagggcctggggagggcatgggggaccccagggcttgaactcaagctccagcccaggctctcggcactgtgtgatgccaggcgagtgtctgtccctccatagacctggatgacctctgtgagccctttacatcttctgcatgcctgccaaacaccaagtctgtgtcctcacagaccttaagccacaggccaggttgcaggaaacggcaaggggaagtctattttaggcccaattatagccaatgaggagtcctgcctggcaaaggcaagtgagctggcatcccaagctgggtcagaggtagtttgctgggctggactggggagggagatagtgagcaggcatcagggataaatcgggcagagcccctgctgcccagggcaaacagtgcaccaagggaagggagaggagagagagctcctgagcccagcgtcctggaagaagctggtgcccccgatatgaggtctcagcagatcctcataacacgcttggatgggcgagttctcagagaggtgaagtcacttgcctaaggtcacacagcctggcaatggcagaagtgggacttaaccactatccatgtgacaccaaagcatatattcttccattttcccctagatttctcttctccaggctccttaatctcagatgcttcagcaagccacctgcctccctgggcttggctcacactccctagctcttgacctgctcatgttctgggcccagagggtaactggactgcaagtctcaccctgacagtccccagggtccccaccagccccattgtctgcagttcatggctctgggttcctctctcagactcaccatgggaacaagaaaaccctacacttgcctccctgagcaccagtcaggtgggcaatagaacctgggatggatggaactgagagtgctgggcctcccatgagggagccagtgaggcagtcaccaaagacttgacacctccaccccagtgggattccagacccaggccagggtctggacctaaatgcaggttgaacctggtcctcagacccagacagccccagctcagcttctggcctggccccaggctgagccctatcctggcctcctagcctcagtttcccctcagactgagcccaccctcccctggagctaagacacaaacacaggacagcagcccaccttcttagggttaggacttggcccgctgggggttagcctaggatggagcattgaattttatttttttttttttgagacgcagtctcgctctgtagcccagactggagtgcgatggcacaatcttggctcactgcaacctccacctcccgggttcaagcagttctcctgcctcagcctcccaaataggtaggattataggcgcccaccaccgcacctggctaatttttttttctttgtatttttagtagagatggggtttcaccatgttggccaggctggtttacaactcctgacctcaggtgatccgcccacctcggcctctcaaagtgctgggattacaggcgtgagccaccgcgcctggcctggagcattgaaatttaagtatgagcctgctgttcctccaggcttgtactgtatgtacttccttttggaattctagcacagccagcaagcagagtggcacccactacctttggtccatgactccaaggcagtcatctactcagacccctgcatacagccacactgtggtggctctgattctgtgacccaggatccccaccccaggcagggcctggctggggcatggcacctgtacccctgcctccaggtccccatcacagctcgtcccagtttactgggaccttgtgctgtgtacctacaatgaggtgcacacattctctgggcccacttgcccagctgtaccatgtgaagttcaacaagatggtctctgaggtccctgagctcagggattccagtgctgactccatgggttcagttgagatgccaggattttataaagcctgtgattctgagagtcctttgttctcaagcctgtggttccccaagctccataaaaagcgagtctaaatctttcctgtggcttccacaactccttccctgtctactcactgtggagcaacccagatgctggtagactctcagggaggagcccacgtcacagtggtttcagggtcagagctggctgcaggaggagctggcgcatccacccagcagtaaataataattaggctccctcctaacctgggggttgcaggagcgagaagtgtttgggctgtggccccaggagacctactctatggagctgctgccagggcagccaggtagccgcctcccacagagaacttcaggcaacatgtctggcaccccagttttcagatgaggaaactgagttgggggtggatttgatgaaaacctcacagagagctggtggtagagaggggcctggaccctctctgggatgtctgattaatagccagtgctccaaaaagcatttccccatttagtttattgattgagacaaggtctcactctctcacctaggctggagtgcagtggcacgatcgcggctcactgcagtctcaacttcctgggctcaagtgattctcccacatatttttgtagagactgggcttcatcatgttgcccaggctggtctcgaactcctgggctaagtgatcctcccaactcagcctcccaaggtgctaggattacaggtgtgaccactacacctggccttccccatttggtttattgagtgacgacacctgaaattgccaccatttgaactctagaacctagagctggggtgtagatggtccccttacaaagaaaacatttccaggagtggaggcattctggatgctctggccttccgtaggctgggatgtgggaccctggaagaacccctgccccagccctggaggtctccattgacatatgagggtgctgatgtcatgatcctgacatcaatgacctgtagctccttatgcccttcccccacaacctgagcatgacccagggaaatgaaaactcatcccctgctcccctccccatgcggtgtccagttcgcctcctggaatctcctggaccctggggacctgaccttttccgtctcctagcccctgggttcagattctatgactgtttagaaccccacccccagccatctatccccagctgacttatttaccttcctttctccatctctgtcatgggctgtgattatcctgaccccagccaggcctctggcccagcactaggtcctccctggtgtctcagtctcccatcagccctactgtcccaggaggaccgcctgagatcccctgaatagtactgagagggggaacgggccactgagctgctccctccagtcctggcacaccctgtagcacaactccaggggacacgattcggagtcggaatacagtgtgaatactgcctggagtttgtgatgactggcattggaaactggcagggtgggatggctgtagtagggaggggggcactgagtcacctgtcctgctggagggaaactaactaccctggcacagagaagtggtgcggggagtaggggagtggaggcaggagacgcctcctggaggatttcactaggccttgaaggatgtgccgaagcccaccgtgtgggcttcctttatagactcaccttcaccaggccttttcgccaactaggtgagggtttccagggttgggcctgggcctcgtcaacaaagcaaagtgaggttattcttcctggccaccaactggcaggaggaagatgaagcccagaaaggggcagaggtggctctagttacactggcaatgctgagaggacccagaggagtatctcagtctccagtctctttatcttgcttcgcacaactccttgcttggttcagagccttgaagaggcggatacaagaggccctctgggcaccgccgcccagtcccgcgcagccccctgcagttcccaggggcgcgagagagggcgacgtagagcagcaccgcccagcggcagagcggcgagcccctccgcggctcggggtgagtcgggcgcggggcgcagaccgcgctctgacgtcgggggcggagcggccgtgacgcgcgggggcgggtctgcgcaccttcccggcccagccggcgattcattcaaaaggcgcgcaggctgcgcggctgtccgggcgctcgccgagccgggccgcggcgccgagtcgaacggggagccgagctggagctgccgcggnnnnnnnnnnnnnnnnnnnnnnnnnnnnnnnnnnnnnnnnnnnnnnnnnnnnnnnnnnnnnnnnnnnnnnnnnnnnnnnnnnnnnnnnnnnnnnnnnnnnnnnnnnnnnnnnnnnnnnnnnnnnnnnnnnnnnnnnnnnnnnnnnnnnnnnnnnnnnnnnnnnnnnnnnnnnnnnnnnnnnnnnnnnnnnnnnnnnnnnnnnnnnnnnnnnnnnnnnnnnnnnnnnnnnnnnnnnnnnnnnnnnnnnnnnnnnnnnnnnnnnnnnnnnnnnnnnnnnnnnnnnnnnnnnnnnnnnnnnggaagcagcggaacttgcggtgtgaggggccggcggggcccggagcggtccccggcccgggaaacttggaccgagaccaggttgtggtgcgggctggacggcggcgcctcggcgcggctgcggcgcggggcggccaagggggggtctggatggtgtcagcccgtgactgtgggtgacacggcgcgtgaggcggcctggccgggcgaacgtgtggctgggacactgggcggtgacgccgggccgagcgggcgacacagaggggctctgtgtgtgggagacaggcagcgtgtgtgcgtgtgttgtgtgagggaaagacccggggtcactggggtcacgaagtgcgtggcttggggcgtgaccggcgcagggccagggccacccgttactgtgagtgtgaaatagagggagaggagcccaagtgactgagaacgagccgagctcgctggcgccatggtgtgcgtgtggggtcaagtggtgtcagtgtgtgtgtgtgtgtgtgtgtgtctgcgcctagggtgatgatgagtaagaggcaggaggaggagggaccggacctaggacaccttccggcagatgtggggcgatgaggaagttggggagccaggagacaagggtctccaggactgtccccacgagggcacccctcaggagttcagcttggtgaggagatggaccctgagggataggccctggctgagggagaaagccgaggctgggcaacatctggtggggtggcccagatggcagcagggtaggggccctgtggtagtctcagcttccccccgcccacctgcatccacacactcacgcatcgaagtccctacacctggcaaagttctgcccctgtgtaatctgtattctcagcggacccggacacaatcttgttctcagacccccccgcccccctcccccgcgcaggcctcagtctccccatctgcacactgaggtgctgggctttgaatggactgtgaatcatcactttgggatcctctattgttttgggtcaactgcctgtgttctcccttcccttcaggcagaaagactgcagtggggggtgggggcaggcttctcctggggacacagcggcccaggggctgcactcaggggctactgatagggttggaagcacagccttctccaaaactggtcaaggaaacgttagcctcccacccaaaggcttcctggtcctctgtcacgaaatggatccatagacaatatggatccccaaatccatagacattcacttctctgcctgggtgtcctttcttcagttccttgggttgggggagagtggggagagacttgttccccaggagtggtctctggtctgggaggctaagttcttgctggagagctggagcggtaccctttcgccatctgggcaagacccttctgaggccccttctcccgtatgaaggtctgtggggttcatgcagggtggggtggaagctgagctccctagtctaggagagggtggcacttgctgtagaatctggaagttctgtcttctgctgtcgtcctctgaaaatgctgattacattctaggggtgggggacagggtgggggacagtgtcaggcactgttctgaacacttcatggtgttctgtcttgttgaatcttcgcagtgattctgagatgtagtgactgtgtttcagagaaaggaactgaggatcagagaagcaaagtgacttggccaaggtcatacagagtcaggacagtgccaggactggaattcaggtcttctgaccccagagaccagtgagatgctgggagagaggatcacccaccttcctaataactgctcatggctttcctggacttctgtctctcaaacttgggctagtaggcgtggcctagccagggcattacattgtgagttctaagtatgatgtgtgtgtgtgcacacatgtctggaacactggggatgggtgggttacatggtcttcctgttcctccccagacttcactcccaaccagacatcaccagaaagtcctgtcccctgccttctagagcctggacctggctttgggggtgtccccatggctttgaagagtgtatggagttagcagcacagcctaggggtagcagggaaaattgagagtcccaggtgaccttcatcatacttgagaggccccctcccctttgcagttgctctagaggcatttccccaaatccacctgcatgttatggtggggagcagacagggagtgaccttgagctggtccctactctctctgggcctcggtctccctgttcttcccagagaccccttttggctctgaccactgttgccacttggccaagaactggaactggggatcagggtgtccctcggtcctctctgcaatgactggagctgtgcttcttggggctgatgaaaatagctgtcgtggtctctaggggctgagccggagttatttccatcctcaacaaagaggtggaaatagcttagggcctgggagggggagcaagaggagaagggttaacttctccttatcccagccttaaaggaggcccccagcctcagcctgtgccctggccaagccaaacctttctgggaacttgggcctctggggatgacagtggggccaggctgggtttccacttgtgaccacagttgggactggtgtgatagctgctggagggagggccctatgtctagccaaggaggggagatattgagggccagtcagcacctgcccctactcatagggtcaggcccaatctcatttcacagaaggagagattgaggttctgagaattcagggacttaccctaggactcctagaaccttcaccttccagacgcggtacctgccttctgtcctgagtttgtcattctgtgtccacactttccctggcggctggaggttggccagcactggaagcaggcccaagacacaccttctggacgtcggcctgcctcatattccagctctggccttgccatccctgcccaggctctggttctagcttctgtgcttccacgtcggctctcccgcacactgccagagtgacctccataaaataacttgcttttcgcctacaaagtgtagttcaaactcctcacctggcaatgaggcctttccttccaaggcctttcagaatttgcatctttaccctcgcctctccttgccagatgccttgtctgccttgcctttgcttttaaagcttccctctttctagaaccctcttggccatccagactatagccccagctccacctcacccaggaagccctcctggcccgaaattagtctcccttcattgttgtgggccacctgccaggtgtcctccctcactgctggggaatgggcacaggtttggggcacctgtgggtaccgcatgctcagcttggtggggccagcgtggccagtagcccaccccctcccactgccgtctctgtgctgacgagacctcttcctgaggaagggcagctgctctaggatcccagcacctgtgtgctgggaggcaccgggagatttgcacccaggtctctggtgctcaccatgacctgaggcagaatgtgtgctggcgggtgggggcaaagactcacggccactcctgtgggtagggggcaagtgtagtgcttgtcatggtcctcgacatcttgagccagtagaggcaactgtccctgctcaggccctgtagtgtgccaggctctgggcccagcatttcctcacaacagcactcacccgggccctctcctttccaagttggtatgggggaacctcgactcagagagcagccctaggctgagtcacgcagccacttgtgttgtagtcaggtactccagatcctacccagcccccagcctggtctccaggcaggaggtgagggtcgaggggtttgtctgacaattctaacattagtttctcaagaagggccaggctggtcagcacccagtctggctgggcgggacctgactacttctgttatggggccagcccttctgccaggtcagcaggagagaggaccagagaggaaggggttttgcctgaggttactcagcagggtgtgtttggcgccattccccactcaggatcgatgggggagcagggatgtggtctctggacagggagaatacccactgtgtgctgaacccgtgtctttctgggcctaggcttggtgctgctgagtggggctggagtggcagagaggacaagagccaatgctgcatccctactctgcccatccgtgggattatggcccgggaggctgtcacatcctcagccttatactcctgggggtcatcattccctccaagcacaggcagggaaaccaaggcctagagagaggaggcacttgccaggccccagtgtcactgggatccaaacccaggtctgctggccttgaagaccagagttctttcctaggccactctgggaaagatgagagctctataaataagctgcccatgtggctgtgagcaagtgccctggctagttgtcacagacagagggggacagcgggacctctacagccagttagagtcagggtctgagtgtgcaggtagagagaggagtgggggcttccagaggggggacctgcgcttagcccagtgcatgcactgtgaggaggagcagtgagaggggaggaccttggccacccacaccaccagcctgctgcatgcctggcctcctgcacagaccctttccctccctccctcaaggagcctcaccccttctcgaggaatcaagggagactgaaaactgatggcaggggtgaggggtgggggagtctggagaggagagggggccctcttgacagggaggctggggaggcttcctacaggaggggatgcctggcccaaggcctgattgtaagaagagcccctgttgcctgtgaacgctgagtcctccaccacaccatgaggtcagctgcactggtgtaattgggaaacaggcttgggaagttggggctgggttcctgactgctgaactaccccttacattcctgaccatggccctggctggtgtgggagcaggtggacgtaggcctgtacaggggctgggacatgggcacccagggccctcccagagaggccgaggcccctctacttgtgctgccagggtttacgtggagttccccaaagcactcttgccacacccaagcctctgggtgacctcggctggctgttgcttggtcctgagcttgggttcctctggccctcgtggagctgtgttgagagccctcagtatcccatgaggcagggactagcacccctgtttgcagaggaagaccccgaaactcagggagggtaagtaacctgcccaaggccatcgatctgcgaagtgacagagccagagtctgaaccctggtgggttgctccagggcccaaccttgtctcctccctgctccaccactgcacttgcactgaccccagtcctcagcgtagctccactgggtaggacctgacctgggatggccctgggggcgcctctttccccagcaccgcaagtctggggagagttggagaatggggcagaccagggctgtggtctcccccaagtccctcccaaagcctctgcccaggtcttccaggtcagggtgattgggggcagggcccatgctgagcacattagggacttgggatcagttttatggccggggcaggtggcaaaggtggcttcttggaggaggtagcagagcatgagccggggctgcagtgaggtgtccttcagcacccccagacccgttgctgtcctgtctcagggccagggttggcaacacagggctgtctgtggtgctgagaggttgacggtggccagaagcagtggagataccaggcctgggtggctcaggcaggggtcgcctgccagttgcccctactccagggtaggtaaacttcatctccttcaaggtgaagttgttacaggctaccacttgacctctctgagcctcagttttttctgtgtgaagcatggaacactgtctttgaggggttcagtgagacccagcttagagtgggaaggggacaggcagtagtgctcagtgaggagggttagggagcctcctctctgcccgagataactgtctggtctcagacatccctcctctagccccagactcggcccaggaagtggggcaaggattgcacctgtaccatacccagactgggaggagctgggtgggccaggtgtggccacctcagcccttttcttggcctcaaggggccaatttagcccccttagcctcagccccaccccatccacctgagccactgaaacccaggcctggtggcagccaggaggtctgaggtgcagaaccatgcccaacttctgggggtgttgctgagagtgggctggggagcagctgctgcctggcctcgaggtgctccccagcccttgagggactggtttataccccatcgtggtgacctgggagctcatggctgcccagggctgtgggagggggcaggagtggagcacctgtctcactgagtggccctgagccagcctctgcacatctctgagcttccagcagcagccctagtaagctggggttccaccctgggacctctttttccccgctctgggaattcccagacttccccggtcttcctgcctctttcagttcacagctccctttcctgccagagctggcacagactagaacaatatgcaaatgagtatagatgcaggcaactcctagaggccccatgggatggcggtgcagacagcaccttctcctggggccctcctgggtccttagtaacagaccctcagttgagccacctactgggtgctactagcttgctagcctccaccatcaggttggcaaacactgcaaggacatttactatgtgccaggtcctgggctaagttgcagggcaaaaggaggcagaaaagagacagtcctgggctccattcctgcttcatctcttactggctgtgtgacccccgccagtgacctcccctgacctcagtttgcccagctgtgaaacaggaatgctcacttctcctgcaaggaaaggcagcaacccaggatgagggcccggcctgcacagggctggggtccattcctttccctgtgagtgtggaagagggaaagccactcagcgtggtcgctgccctacttcagccccacttgccagggaaccgctgggctccttgctaacctggatttctctgttgatgggtggcctttgtcttcctgccttgggtgtggccaccgccaagggaggcctgtgtccagctgtgtttccaggcaaccctagcctctggaggccagagggaggtccacaggctcaggagccactatctgggaagcagagtagctgcctccctacctgccctcctccaggtgggcaccagcccccacctccatctcccccagtgcggcctctcttagcaggcagcctggggagcctgctgagaccgaactgttcattcttctccatcccttgcttaacccttcctggctcccataggccctagggggaagtgcaggctttttggcaggcagctgagccttggtgtgacctgagcactgcccaccaaccttcccagactcctccagactcctcccgtcttctccgccctcccaccctccagattcccaccagggcgaacccagcaccgcctgtataccagactctgtgccaggcactgaacgtaaataaaaggtttgtgcccttctcctccacattccacacgtagggaaactgagtcacagtgaagtgtggggaatgcttactctgtgccaggcctgtgctgagtacttaatgtgattctcttctttcagccttaccacagccctctgcaggcaggccacagagccagtgcaagacagagcagagcaggactgcaccccatactttgtatccccaggttagcccaggggttcagatctgggttctgacccaccccagcctctgggctccttccccctcagcctgctcactggctcttctagctcggcatagctgggctctctaccaagagtgccttttctgccttctcccccaaatcagcccatacccgcccaggtcggcactgggcatggagcaggcagctcgtggtggggaaagggctgggtaataggatctgcatggcaccatgaatgctgagggggaggtgggggagagggtacttccaggaggaagtgacttcgagctgagctctaaggaagagtgggtgctggccaagcgatgaggggagagcagaaagcaggtgcagcgtgtgtgagggtggaaagcactcagcgtggcaggcgtgtgggtgggggaggttggtgggggcgcgtcacgacgccatcctgagggtggtgggagctggcccagggccagggccagaactgggtgtcagggcacctaggctgcagggcgggactgacctggaggccagagacagggcaagggggcaagagcaatgggcgcaggccttgggagagcttagggactgtagggaaggggagggccctgcctaggggagggggagtggcgtggcagggcccgggtgaccccagcgagcttcagttctgggaaaggggaagctgcctgtggcctgggctggtggcacagcttcctctttctctgaggcctccaggctgcacctccctggggctccaccatctgtggcctcaatcgtggtctggggccctcagcttgggggtctggccgtggcctttgctagttggcttttctccagggaatttctggttctcattgttcgggcatttttttggagagctgagtctgaggaaaccctccccgcctcgtgagcctgcttggaggcctcccgcttcagacatggggctgggtgtggagttttgtggcaaataaaacagacgtccctgccctcaccactgtctggtgggggagcaaggaataaacaagtaagcaaacaaatacttaatcacagccctctgccagcagggcagaggagaagggctgtggagaaggaaatcccatgacctactttagcttcattacctcctttaaaccccatgactggctgggcacagcggctcacacctggaatcccagtactttgggaggccaaggcgagaggatcgcttgagcccaagagttggagaccagccagggcaacataatgagaccccgtctctacagaaaataaatttaaaaatttagccaggcatggtggggcatgcctgcagtcctagttactcaggaggctgaagcaggaggatcacttaaaagttcaaagttgcagtgagctgtgatcgtgctactgcagtccatcctggatggcagagtgagacactgtctcagaaaaaacaaaacagaaattccccaaaaacttcgcgacagccatgccagcaagatgaacgtccccatctctgtagatgagaaaactgagacccagtgatgtgaaggtcccaaagggagttggtggcagtggagactgggccccaggctaggagacatgggaggagtggcctctaagccaagttccttctctgctacccccctggggcccctcctccccatccagtgtggctgggtgtggctctcctctgtcaggcatcggaggctctggggcctcactgactgcccagcctttaggatgaggcagagacggatatgggaccttcagatatcccctcccagccgagggggcttccatctaactgtttttttggtcacggttccagggccgttttagacagtggaggccttgtggggcagggtgtgaggggtgctgagcagcaggtgtggacatgtgtgtgcaccaggcctttctacctgaccgggcaagtccagtgggggctcagtctgggctgagtgtgggggccgggcagccagactggagtaagtgctggtttggggtaatgagaaggtgcgtaattagaaggtgcaaggccctaggtggcagtgtctatgcgtgtgctggagtgggccctcgttggctttgagtctgggcctttggaccccgctttcttcctggaaggttctagatcacacagctctgcgtctgtctgcagatgagcagctgcacagctgctccctgtgggctcaggtcacctagcaggtgccacccagggttggggtggttctagggctctctgctgtggttgcttggcctcttttcacccccgcatcagccctctgggcctaccttggggacatggagggctgctagagctgggggctgggctgttgggttggtcacggttccccctggctttgtcttttttttttttttttgagatggagtcttgctctgtcgcccaggctggagtacagtggcacaatctcggctcactgcaacctccacctcccaggttcaagcgattcccctgcctcagcctcccgagtagctgggattacaagttgtaccaccacactgggctaatttttgtatttttactagagacggggtttcagcatcttggccaggctggtcttgaactcctgacctcgtgatccacctgcctctgcctcccaaagtgctgggattacaggcgtgagccaccatgcctgccacagcctgcccccacccccagcatcaggctctgtcttgcgtagtcaggcctagtggggaagtgaagcctgaggacttggggctcgtggtcaggtctgtgggttagatccctcaaaggacagaggaggggccatggggagacaggctcgaggtgggagctgggccctgacaagggcacaggacactttggggcagaaactggaaggaagacttgtgaccaaatttaaggagtgacaggggaccctccccaaatagcctgggggtgccatctgttgggtgttgactgccaggtgtggcctccaccctatactgtggccctaccttctcctgtccctggctttcccctgagctggcctgggacccagagtggctgccagtgacctggagagtcctgagatgatgtaactgctgcccactccctcccctgagtgtaactcaaaccctgggcccctctgagatctgccaagagggagggcgggtggacagatcggtttcctgggctgctattctaggtgggagggccgggctgcctgcagggagaggactctgagtgatttgggactaccacaggaggcgcttttctcacctcaccggccttggagtcacagcgggggcctcagccgcggcggccctgagccagtggctgggttcccaggctgcccctgggcttaagaggctgcgtgtggcctgaagagcacggctttcctcagcctcgtgcccctgaagccaggcctccaggaagtacacagcggacttccttgctctgccacctgtcccttctgctgtctgatgtgaatcctttgtcctgctgtgtccgcctcgtccactggccggaggcttctccagagcaggccaccgtctgggcctgggggcctcagtctcagaccggtgggccgtgacgccaccatggatatttctctgaagtatcacacactgcactcccactctgctttatttcgtttcttggcacttaccaccaaatggcaggggcacctctctgtttgcagttgggtctcccctgggatggagctccctgcagacagggaccttgtctgtcttgttcataccgatttctccagtgcccgcacgcagtaggtgctggagagatgacaaagacagagcactggctgccgtgaccaccccagccccataggtctgccaggggaagagctgtggccagacatgttccagcctcaagggaggagtcagcctccctggaagaggtgtggacagtggccatgcagaaggaccaggacctagatggggtggggagctgtgggagccagacccactttggggaaagcttctagagaagcttctggaaagagaggccttcgtgttgagctttgaagggtaaaggaaaaggccttccttggaccagaaccagcaggagtgaaggcagaggccgggcatgcttgcagacctgtgaggaggaggcggggggagcctgagcctggagcgctgggctggagtgtggaggccgggctggggtgttgggtgttggttgcaaccctgtcatcacggacacaggccgccacacgcgcttccttcccctgctgatgcctcggggcacctggcagtttaaggaaggggaaggaagcccttcctcctctgggaagcctcccagcctgcagagccttcttcctgccttcctgcctgtgctgccccgtgaggccggctcccaggcagggcagccccctctgcttgggcctgtgcttgcgggtgtggagccggcctccccgggctctgcctgcccagcagcaccttgcctgctccccatgagtcctgtcatcctggaagtggtgctgaggggacagcagctgcctgcctgtccctgccgctctgccgagcctcctctccatctgccctaggccggcgaccaccaggggcctgaggatgaagccaagtctgctgtgccggcccctgtcctgcttccttatggtgagctggggatgggccctgggaaggagaaaagccgcaccctcagccctgcagccctccagcaagagggtgcagacactcccggggaaccccctgctgggcagggctcagttactcagctcgtcaagaatctgaggcagctggaccctaggaagcacctctgggcccacccaggcttgtcagggagatggagaatgaagggcttgctggcatttatgggcaaggcaggcatggctgagggcaagatgcccattggcacgcaggcatgagaacggagcccagcccagagggtatgctgggcaccaagaggaaactgggcaaaagaggcctgggatttggaccctgagagccatagcacctcaggtgctggggttcaagatctgtattggtctgggggatcccagattccaggtcccaggatcacaggatcaggccagctgcccggagctgcaggcaagtccacattacagacttgcagcatcttggggtctgccctggggcccatctttctgctgtgacgctagaagctcagggagggtgagacttggccttgggccttgctaagggttgctccatgtacaggaggccttccagccttagcaggtgctgggagccgctctggggtctgaggagatccctattccatctccagggcagctgatggtagcctcatccagcctaggccaaattgggggactctaggagggattcaggagagacagttcattcctaagaatgggaagcagagagaactcctagtgaaatgggctggggacacacactgagaagatggagctttcttttgggatgcgtctccctgtttgggtgtgtgggtgtgaatggggtagcctcgccttgagggaagattgcagaggaggatgtggtcctggagactttcgctgaagggagagcccagaataggaagcgccacctgcagacttggctccagggattataaatgaggctggttaatgatatgcccagctgtgatggggccagggatggacccaaagtaggaggaagtgggggcagaatacgagagaggattcggaagcatttcctcctcatcgttctggttagctggaagggcttgagatcctgatgtggccttatctggggctttccagcactttccagagccagatgtggctctctccttgcccaggtactggtcttgcagcaggtctgggacaggacaggttttcctcagtgtgagggattgaggttagaagagtgtgtccctgaagcccgggtggggtagtcagtggtccctaccactggggtttcaggaaataggtgggggatagatgaccccagagaccccacacccagcactttctgcctctttcaatgcctactgttcttctagctgctgccctggcctctcgccaccctgacatcaacaaccctttggcagtgcccacctggggaggagcccgacctggtgagcattgccctgctctcctgcctgtcctgggagggccctgagggccaggggcagagtcctgtgcctggcccccaagggtcctcaggcttggctcctggccatgctctcaccctttacctcccacaggacccagggcagggcacattatgcaggccctgccccccaggcaccttctcagctgcatggggctccagcccatgccagccccatgcccgttgcagcctttggaggaggctggaggcccaggtgggcatggcaactcgagatacactctgtggagactgctggcctgggtaagccaaagggagtgcggggagggctcctggctgggtgaccaggactctggatcctggggccccagccttattgtaccctgagcaggcctcattcttcccatctgtgaaatgggatggggcaggaccacggagggtgcctggtaggaaggaatccagcctctcctaaggatagtgtttggggaaacttctgggcctcagtggtatcttccctcctcgcaggtggtttgggccttggggggttccccgcgttccatgtcaaccatgttcctgggcacctctgggtactcatggctgtgatggtgagtggcagactggggctaggactggtgcaggggtatgtgcgggaggggccagtgagttggagcccagcagcctctgcagtgttcatgtgggggcagtggggtccttcttccagcccagggcagggcgtgcagccaaagggtctccagcagggcacagtcagccgctcccctggctgtttctgcccaccatgcttccgagtggcagagagtgtcctgcagatggcagccacagctgggggctggggactcacatactgacctgtcccctgtccccatcccttcaaagagattcatgccagccaagtgcagtggctcatgcctgtaatctcagcactttgggaggccaaggcaggaggatcactttgagaccagcttgggcaacatagcaagaccctgtctgcaaaaaataaaaataaaaaattagccgggcgtggtggtgctactcgggaggctgaggcgggaggattgcttgagtccatgattttcatgctgcagtgagctgtgatcgccccactgcactccagcctgggcaacaagtgagaccctgcctaaaaaaacccatgcagatgagtgtgcgcatgcaaacactcacatacccacacgcacctcctcccgccactgagtcagtcaccccctgaggcactagattcatggccaggccacagggaggcagatcccacgtccctgtgcccagacatgtgtcctgtgtgccatctcttcaccccctgaccccagcgtgaggggagggtggggctgggtgtctggccgtcctgaggaggccttgttcaggacaatgcttcgatggccagaagggaaaacaggagggcagtgggttgacctttgcatccccagcatggcggggagtgggctcccctgggcacattggctctcctgcagcccccactgactcgggccctgggcccctgtctctctgtgtttgtgtcactctgcttttgtcctgcctccatcgtctgtgatgctcagagtgggggcggcgggcccgacgtggcgtggaggtggcagcaggggccagcagcggtggtgagacacggcagcctgggaacggcacccgggcaggtggcccagaggagacagccgcccagtacgcggtcatcgccatcgtccctgtcttctgcctcatggggctgttgggcatcctggtgtgcaacctcctcaagcggaagggctaccactgcacggcgcacaaggaggtcgggcccggccctggaggtggaggcagtggtgaggcccagctggggtccaggtgggaaggacgggggcacgagcccagccccagctccacttgggggctgccagcggaatcctgcctggcctctggggtctgagagggagaggcttgggaggtgatagctgcagactgacaacatgggaggaaaggtaaggggacgaaggtgtggccgtgggggcagagcagaggtggcacagctggtcaagtggcttcagtggatcctaccctgggtgaagccttgcccagatgtggggatctggactctttggaggccacagttgtgtgtatggttccagggtcggatggtggccttggagttactcaaggtgacctctgacctctggcctggagtagcaggagtgccctgtggcaggagggctggcagggcagctgtcctgtcctgggcaggcaccataaggggctcgggttttggttccaggctgtagtttgagttacaaggcctggaaccggagggacaggcatgcgccaccaccttcacccccagggccccgggcccctttccttcttccccacaccactactcccctgcagggcaggggcccactcgcacacaccctgccctgggcccatgggagcctgtggctacctcaagagtgaaatggcatctcccatgctagcaccctcggctgtctggggctggcatgggagccagagacccttctaagtcctgacactgaagtctggcgggggcaggaagcggacaggagcagtaagccggcaggaggaaacgtggtgactcagggccattttgcctgggactgtgcttgttttcctagagacttccctttaactgctggatgctgcctgggtgcaagtcctgggagctctgtttgctgctgggcccagggctgatcatcgtggcccattctcacacccttgagatttgggcccaaagctgactaggggcactcagttaaattgttacatagggcacagtagagaggccatggaatagcagtttgctgtagatttggggagttctgggtagggtggcagcccacagctccttgaggctgaggaggagacagtgcagacccagaagacgctgacgcaccgccccctcgcccgcccaattcaatgactggagttcacgtggccctgaagcctctatgcacccgggctgttgggtgcaggaagcactggtgttgaatcatgaaggtgatatgggcttctctgagcctggatcccacatttgcagggctctgggaggcttgtcacctaaatgcacatgctcagggcccttaagaaggccagggttgccctctgctggcagatcatggtttagctcaggagtgcggcttccccctcttccccaggatcagggcccttctcttccccaggaatcaaccctgcctaccggactgaggatgccaatgaggacaccattggggtcctggtgcgcttgatcacagagaagaaaggtgaggagaaggtctgaccccatcccagtgcccaggagaggagggtttcctccaggagcctgtgaggcagccgcggtgggcagagtcttgccctgctctgccttccctgccagggtgcctcaagcagcctggtgctctctgacccaggagtgcacacctctgcctcccattcttgcctgatgaagtgggaggaaaaggcgcacagcccaggctgggagtggtggtatggagggtaggtggggggttctctgctggggcagggggtgggaggtgtgtcccatatggccacagtgagggtctgactgcagctacccacagagaatgctgcggccctggaggagctgctgaaagagtaccacagcaaacagctggtgcagacgagccacaggcctgtgtccaagtgagtgggctggtgggagataacggggccaaaacctacattaaccagcctgcctcctggggatctcccacttgggtctccctcaagtcaccctgttccctgctggggtctcctgcccctggcctggcctatggccacttctgcctgtgccccctgcaggctgccgccagcgcccccgaacgtgccacacatctgcccgcaccgccaccatctccacaccgtgcagggcctggcctcgctctctggcccctgctgctcccgctgtagccagaagaagtggcccgaggtgctgctgtcccctgaggctgtagccgccactactcctgttcccagccttctgcctaacccgaccagggttcccaaggccggggccaaggcagggcgtcagggcgagatcaccatcttgtctgtgggcaggtgagatgggcacagatgcagcaggggcaggtaaagacgtgacagcctgggggccgggagggggaggcagggccccagcttgggccctgagcaccctgctcaatgggagccctgcccttattgggcctctctgggcagtggaggcggccagagagatcaggactttccggttatgttgtgtctcacatggagcccttgcatccctagggcagcatcttggcccccatggcacccgggcctctcaggctaaggctctggtccatgaacttgctgtgtgaccccgggcacgtgctgccttctctgtgccccgggatccccgctaacggggatgattgccccactctcctcacaggttccgcgtggctcgaattcctgagcagcggacaagttcaatggtgtctgaggtgaagaccatcacggaggctgggccctcgtggggtgatctccctgactccccacagcctggcctcccccctgagcagcaggccctgctaggaagtggcggaagccgtacaaagtggctgaagcccccagcagagaacaaggccgaggtgagagtcaaggagaaaggcatctgttggcacctgggccaaccctgaccgaagacggggcaggggtggaagtgcagcgggccctaggcaggggccactttcctggagccagaagccagcccctgactcagctctgacccctcacccctgcccaccaggagaaccgctatgtggtccggctaagtgagagcaacctggtcatctgaggggcggtctagtctaaggacactgcggccctgccctgggaggttccgaaggcttcctggaggaggtggagctgcagctgggactgtgaggaccgagaagcaatggcccagcagacgagacagcaaagaccaaggcctggaggtgggagcgtctgccccagtgaggaggcaggtggccggcgggcactgtgtacaggagcaggctgagccccgcccctggccctgctgccatgttgctcccctgaaggatgccccgacccccgtgcctgccctggctggatcctaggagcccacgggattctctgtatcatcagaggctgggcttggcagaggggaggggcctgtgcccgtcacccctggccccattccttggtaattagccacacccttgcctctgtacagggccctagagcagatgtgcgtccccctcctcttccagcaggtctataaagggaaggggtagcagaaagtcctgggctaggagagtgagtccctgggttctaatcttgggcacatctgtggccatcgctgggtccatttttctgactgtgaagtaaggagagacgtctcagtacccagggcctcttcagctctttgtaggttctgggctgggttgtgggggactggggagctgggctctaccatccctcccattagtagctttatccagccccgtttttgctgcttccagggcctctgccttcaaggcccccatggggctgtccatccatggctctgcctacggaaggggcttaatgcatgtgcctgcccctcccccagctgtttttaatgaaactgaaaaaatagacttgatcccggcaggactgtgatacagagccctagcctgcccagccagccccaagatctcaggagctttagggagaagacttggtggggctggagcacaccttgggcctcagtggtttctgtgtccctgtggtgccagtgcttctgggcagtgcaggcggctgccaggcccagccctgacttccactctggctcagcaacctggttatttatgtggggccgtgcaggcatgggcccactgcctgtccatcctgtttctcttatttattgaaactcaccattgccctatccttgtgtctccacccccttccatgtgttgaataataaaaggtgggaaagtgctgtcacgaggagctccttttctctgtgcccttcccagcttatccgcctgttccacttgtacctgtccagccctgccctgtgttgggcaccgtgacaggctgccctcccctcacagttcctgcacctcagcagccagggaagcagggcccagaggagacccatcaactcatctggttctcaccaaagcccctagctagaggcagggctgtcccacagaaatagtgtgagccacatatgtgactttaaattttctgacagtcacatttcaaaaagtaaaaagaagcaggtgaacttaatttttttttaacccagtctatccaaaatattttcatttcaatataaaatcagtataaaaagtgtgaatgagctgtttttgcttttgctttgaaatctggagtgtatcttacacatcttgattggaactcaaatatttcaagggctccatagccacgtggccagcagctaccacactggtcagcgcagcacctgaggaaatgcactgtgtggagcccgggaggtaattgggggtgaggaagatgtgcgggccagggaatgtgttccacagagagggacagcatgtgcaaaggctgagcaccaacacatagtggtcacctgggccttatgcccagggagcctccaaagcattcagctcctgcttggccagtgtggagaggaaaggagccacaggagcgggtgctacacccggcaagacagagcgtctccatctaaaattcctagggcaagcttccaacccggcccaagggccgcatgtggcccaggatatggctttgaatggggcctaacacaaattcataaactttcttaaaacattgagatgtttttgcttttttcttttctttttagttcttcagctattgttagtgttaatatgcggcccaagaaaattcttccaatgtggcccagagaaaccaaaagattggacacccctgtgctagggtttggtaatgggaaatgggtcgggggcttagggccagctgggtggggcaacaggagcagtcctgggggcacctgtgacacagccatggaggatgtcccatgccatccagatgtgaaggcccagagctctcaggagacagacctggagacaagaagacctacaggcactcaggtgggtgtttaggccaggactgggctgggaggaaatgtcctggggacgatgcctgggctgctccagggcaccacagagaaggcactgctagggaggcaggaaagaaaccagggagggcaacgtccgtggcagtgtcctggcagccaggggaggggtgggcgcagggtgggctgcaaggccaggtgctgctggggggtgaggaggactgctctgtgccctggtgagtggcacaggaacttggtgggattcgcctaaagggagaggggagaccagggccagggccaggtggattgagggagacagctccctgccgaagcctggcaggccatagctgggtggggcctcaggctctggggagagacaattttcagttaatttagggttttattgtttgttatgttgtctaaagacgggagagagggacacatttaaactaacggcctcagagagaggctgaagaacaagagtgacacctgatggaacctggggaggtgtggagaggaccagcctgtgggagtccccggcctgtctgcagcaggcacagggcagctatggggcggccatgctggggctgtcgggaggcctggcttcacagggggcaggggcctttctcctgagcagaagccaagctgggggcctcctcctaccctgggcagatgtgctttgggatttgactctccttgggtacctagggcacaggtgtctctctccagggcttttcaggtgggcaggaaggggagggacacctctgaagatccaggagatgtttcacctgcaccagaagaggggaaggaaacagaggctggacatcaggagggatgttctggagcagaaaaggatgccaaagtgtaggacagggtgtccattgtaggggactagcaggcatcaccagtgtacccaaataagtatttcctgcggctgccagagtgtgtttggagtccctatttgccagctgctcagctgcatctcagggtctggcctctccaccttgactggccctcagcctccttccccaggggaaggctgggctgtggggtctagatgccctctccacagcctgcctgtctcgcctgggcagaggtacatacacatgcaagccagggtgcaccaaggctgggtgcaggcttccaggccagggctgagcgccccctcacagtaagcactgtgctctcctccagactccccctccccaatttctgcttgctgaaaggtgtggccctggcctgtttcttcacctgtcccttggggtattgaggctagcttgcaagagtgggatgaagagctgagggctcaagtaggagtgtgtctgatgcccttggtcttcagggtccttaccctcacctggaagcttttctggcttgttccatctaaatccctgaagctttgtcagcgcttgagttcaagaggcccacgcggaggtgggagctggaggacagggtggggttctgggctgaccactgaggggaagagttctgagcttgacctctgtgctccacccctcttccctatgggccagaatggtaggggctgggacccaagtctccacctcccctcctgctcctggccctcagctctgccactgtgacctggagctgagcctccctctgggagaaaatcccttcctgcaccggagaaactgactatggtgactcagccccaacaatgcctgtggccagaggtgccccctcggacactgggggtgggtttcatattggatcaaggacaggaagggaggctgggtggaggcacacggtgagatttggtgagaggcattagagagtaaggaggcctaaaagttttcatttcagctgcagtgtgagccaagctacttggcctcttttggcctgtttcctttccaggtgaggaggctgagttcttggaggtatagctatggggatgtggagcatgaactgtaggggcccggccctgggaaggaatggtggacagataacccagtaagagaagcctgggcctgggctagggcagtggcttcacccagaggggagataagagattcagatgatgtttaggaggcaaaactgatagcacttgatgggactgctttggatgaaggcgccagagcctccctcagctgtcctttttctgtaaccacaaaccaccaagtgccccttggtttcccatctgacaaatccatcttttaagaaagctcagggcgctgggttcagtggctcacacttgtaatcccagcactttgggaggctgaagcaggcagatcgcttgagcccaagagttcaagaccagcttgggcaacatggtgaaagcccgcctctacaaaaaaatacaaaaattagctgggagtggtggtgtgcgcctgtagtcccagctactcaggaggctaaggtgggaggatcacttgagcccaggaggtggaggttgcagtgagctgagattgcgccactgcactccagctgggtgagagactgtctcaaaaacaaaaacaaacaaaaacaaaacaaaacaaactcgggccttgcttgctctgagatgggcagaacatggggcttggtgcgtgggctatggagccagaacaagtgccaaatgtgagttctaactctgcctctcaccagctctgtaccatcggccaaggtacttaccctcctcagcttccccatctaagatggtgctaacaacagggctcacctcacgtgtgctgtgaggaccgaatgccttaacaaacatgagcagcaggcaccagccacacaatagatgtcagctttattgcgcggatggctcaatggatttcaactctgaatggcctcactgtgctcccacatcacacacttagggtgggtgctgaagttgccacttaaagctccccagcagctgtgagacccttagggcagacccctgtcagatcagctgtaagatgtaccataggtttttcttgactactgagaacaaatttagcatcaacttggggagacgcccaagggactcactggcccaggacagtcctctgtgcctccctccccaagaaccactcagtctagtcacctaagacttttttttgggggggaatttttttttttaatagttattgagtgttctacagcttacagtaaataccatagttacaaattcttggcttcaatctttcagagtgatcactgtctgatcttcaaaacaaaacaaaaacccaaaagaatccaaaacaacaaaacaaaaccagatttacacttcatacacacaggcaaggccatggggctttccaatctttacactccggactgtgttttgaaaacacctataaattctttgatcaaactacttggaagacactggtcaaaggtttattattattattattattattattattattttaaattttatttctttttaaaatgtgagttccaataaaatttaaaaattagattccaacctgtagattaaaatgaattaaaaaatacaaaatcatatacaacgctctcttcacagggatgttacatgccatgagaacaggtttctctgtcatgtgatatgaaacagggaagcagatgcctttaagtcaggatggggacaggcccttgggcctttcaagattattacagacaactccaagtagctagaggcctggccttaccccccctgggtaaggaggagcttgagtcacaccatagatccagactatctggctgacccgaggagaaggtctctgggacagtctcctctctttccctgactctcttaggcctgaggagaaaggctggggtctggagatgctggtcttgctggggtcaggcccaaagctgatctcacccatttgattcctatgggccggtactttgcaaagctgttacatctgttctccttaggaaggaaaatccccctgctatcagtggctggaatgggtagaggacctctaccacagcaaggatatccagggactatccatgtggccatagggaagcaagtgctgttttgtccctttctagctttgtggcagccagtcccaactcctgtgtgcctcggttggcctttgggttggactcaacagcatgcaccacagaagatatccactggagagactgagggactgggacccaagtctggcttaggcagggctggccatggaatgttgaagctggcctgccaggaattttgaaggctgggtcctggaaccatataatgcctaatttcagaaacgaggagttttctaggaaaggggcagataagtaaaggacaaaccctgcagcccccttggcatgcctgcctgtgcgctcagaggctccggtgtggaatcccatcagttagtctggcgtgtttcttcagctctgcgggtgggtcccaactggcccactctactactgcccctctctggattcccaagcttggcaagcagcgggggccgcacagccagtagtgatgtgggagaatacaggatggaaaagcagacttccacgtattttcacttaactgcaattgaggaggaattctgatacagatggtgatatataagacaaagttcacagggcccagaatggggcccaccccctctgggcacagaacaaagctgaggaatttgatatggaagctctgagcctcgcttagtcagtgcctcgctgggaacctggatgagtcctatctgtatgaggagccaaaacttggtgaccaaggggcctgtccttttatacttcatgtgattcctttctgaaggccatcagaacaaagcaagccctccaaagaaggacccccagatctctgggaacggggtacctcaaacttggaacaattcgggtggccaggggtaaggatgctcagagtctggttctggtcctcacccatgggaaaagcaagcccagggacttcagtctgtacgttttgtaccaactcactggatctggacagtgggcaggctctcagggattaggaagccaggtgtgcaggcttaccaaggacatgggtctcccaatagaaagatgcctcgtgctgtccttgaacatgtcttcggtcctgggcattgtgaccccaaagtgttttgtccaagtgaggcctttagttgcaaattctcatcctccttgtgctgccagttagatgtgcctctgggtccctccccagggctcattacaggtcctggcccaaagcagttcatacaaatctgctcagctcagagactgggcttcccagctctataaagtacagttagcccctccctccatgcttgccaagagacccagcaggtggcagcagaaagagcagaggatttgaagaatcacttccaagctgtgtgaccttttagcaagtctcaagcctcctgagccttagttttttcatctataaaatggaggactttggcaaccaatgtcaaagtactttgcataccaaaaacgctctggacaggtgtgtgtgtctctgctaaatattcaggaaagaggatatacattttagggtcattgccaggtaagaaagaacagcaactgtcctatctcatgaggaagaaattaaatatgcattttttttcaaaacatggcaaaccattatgtttcaggctttcactatttgcaggcaatccagctcccagactcaaacttcttgaccccaggccagtgaggagagggggtcaggtagaagtagaagaattcaaaagggttggctggtaacgagccatctgtacccctgatcctggccataggtgttgcacttggggagaggcagtggcatgaggaggagagaggggtttgcatcctggggccagtgctgtagctcactgtcaggcggctacatcccttgtcctctcttgcttgcctgccttcaatgagacggcccttccagctctgactttttgtctagcttgaccaccgtgccatctagaatctttggaggtatctacctatggtacctcccactagatctctgtgaccttaccagtaactgtgcccatcctaccagaggcacatgactgtccccgctctcctgggctcagtccttttgcagtgactccccaagcttggctaggcttgtggatctccatcacagcaagaggctgaggccggctgaactggggctcatactgaaaaaggggtgctggacctgggctcttccagaccacagcctttcagtgccttattttcaccttggggcccccctttgctcttgaattacatagtaggtgctaagatagggcacagagcacagatgcttcagtacgtgagcctgtgtggggatcagatggaggggaacgagacagcagacagcctgggattcgagtggctctgtcacttattagcaagtcacttgacttttccaagccttgatttccttatggatcaaataggagaaataacctctatttcatcgggttaaaccagataatttatgttcaactgttctgtgaactgtgaggtccagctgttagttttacttactggtgttgaaagaacaaaagttacaaggtcattcctaggtctcctcttcttcctttctcctctctgtggttccaccccagcccacatggaggcagcagggttctgggaagcctagcggataccagcatgctgctcactgtgggcctgttcccttccataacctgtttcctcatttgtcaattgactgtaataactctaaccctgtccctctcagggcgagtacatgaaaggccgtgaagtgctttgacctctgtgatgcacctgacaaatccaaaggtttctattattattatcattattattattttggcatttttcaaacacgtatgacataatctagaacaaccttcacccacctttacaaaaccaaagagggtggaaggaggtatttgcaaaaagtgaattaacactggaaaactttctattgttttaaagtgaaacctcatcagcacccagaacagataatttagaacagctgaattttttcttactggtcctaaagttccttggaagcccaggaaggtgggcccccaaactcctggctctaggccaaggaggctgatgggctttaccctcctgggaatggctagacagcttctgagctccttccaacccaagggtttcctgatttttccctcccttagggagacatgggaggttggggtaaggatatgtccaagtttgcatgaattttaaatgaaagcagttttttaaagtcccaaatgttgtcaatgatcccattttttacaataaaatgttcgtgccccacccccagaggggctgctggcccagccaagcgctgggtgccggaggctgctgctgggcaatccaggctcctggctgagactagcagggacctcctcgtcccaggggtccctcttctcccagatgagcctgtctcctgggcctcatcctcattctcctctcctgatgactcccactgtcttcctcctcttcctctcctctcgggatgaggggctactgtcctaaaagcatggcctctccttttcggccagtccacctgctccttctcctggaggtggagtcaggtacaggacggaagttccagatgtcttcacagaatttccaaatgctatttcttcatttgcaatttctgttcctgccatccgcccccatgtagcctctgcccagtcttcaacccccgcctttggagtccgtggaggaaaagagcagaaacaggagcccagagaccattccagactcaccaggtatgggcgctgccgacttaatttttacaaaaccaagccaatccgtccctaggtaaatttttgtaagcaaggtgcccactaggtaggaaggctgcatttaatgctaatttactgtaaggtctagggaagtcctttccgcttctctgggcctcagtttcctcatctgccaaatagggaaatggatgagatgattgctaaggtcccttcagttccatgagtctatgaaatgtttattgctattgcttttccttcactatcctcaccttcagagctgccagcacccacctggaatgtggttccttcacttgggccatgaatggcacaggtaaccaagagcttggcctgcctgcaagctctatggtcagacaggtgagtcctggcactgggaagggcaaaagaaaagggagagaaatgccctaggttcccactccaatcaggaggaagctcctcatcagagtgggtccatgacagctcagaggctgaagtctggatgacacagggcatccggccttccaaggcctcgggatgctgggatcctaccaccctgcagccgcttggcaggtctaaggacaaaatcaccttttgaggaagtgccaggtcagttaacatcactgtgcaaatcagaaggtccagggccagatgctttggccagagacctttcaaaccaaagccatgaggcaagcaccgctcctcccttcttccctctccttccccacaatgccctccctccccccaccctcccccaaattctaaagacttttttccccaggttctcagcctggggtattaagctgctaataacacgcctacatactcaggtggttttgttcttggtctgttgcaatggttctcaggagacatttcatttgtgtctgggacatgggaatgtcctgaactaatcttgcttaagaaaaaacaaccagaacactcccctagagatgtagcctgctcaacagctctgagttcctaccctggaccacatctgtttatgctcttcaaatggaatccagccttcagatgaaccactgcaataaaccctactctctgcttgcctctagactgggatccccagggacaggacacttagggaagagcagagaggacatggcctggtcaggtaggaggaaggggatagagctggaagggcaggggctaagagggggacagttggggagaggcaggagattagaaaaagcagcttttacaaaaaccaaaaataaaaatcaaaaccattaaagatgcataaagtgacccttgcacttccgttgtctcttcttgcaaatagaggtggtgctgctagggaactgctccagcaccggtgtaagacttgagtagttgcatacaatgtgtgactccagatctgcagagggaaaggggaaagaaacagtgtcagtgatattcaggaggcttctcccctcaactcgggagcccgctgtgccttcctagtgaagctgcctgcctcccgcctgtggaagttgttgtgctctggtgccaagagccctggaggagatgggggaggccagatgatgtggggggccagaggatttcaaagtgacatccctggagccctatggttcactgtcactgcctcaggagctgctgaggggaccaaggaagccagaggtctgggtcagcccaaagcctccaaatagctccaaccaaagctcttaacatatgatctgggcaagagttcatttgaagaatggggcccatagttaaaagaagtccgaagaccataaggtaaatggcacagaatttagtactagagaactgaagtttaagccctagcttaatttttactggctaagtgatatttaactacatatttatctgtaaaatagagctaatgatccttatttcacagagcaactataaggattatgagataacataagcaaagggatagctattattatttctgttattatttagatttcaacaagcagtcaacagaagtgatagctattattaagagtgatattatggaccttggagcaggaaagcaactggtaacttgacagctgttacctgccctagctgacacctgtgctccagacccaaaccagggactttgaggcagttcctgt

SEQ ID NO: 517 - DNA, 1073 bp, Homo sapiens
tcattcaaaaggcgcgcaggctgcgcggctgtccgggcgctcgccgagccgggccgcggcgccgagtcgaacggggagccgagctggagctgccgcggccaggaatcaaccctgcctaccggactgaggatgccaatgaggacaccattggggtcctggtgcgcttgatcacagagaagaaagagaatgctgcggccctggaggagctgctgaaagagtaccacagcaaacagctggtgcagacgagccacaggcctgtgtccaagtgagtgggctggtgggagataacggggccaaaacctacattaaccagcctgcctcctggggatctcccacttgggtctccctcaagtcaccctgttccctgctggggtctcctgcccctggcctggcctatggccacttctgcctgtgccccctgcaggctgccgccagcgcccccgaacgtgccacacatctgcccgcaccgccaccatctccacaccgtgcagggcctggcctcgctctctggcccctgctgctcccgctgtagccagaagaagtggcccgaggtgctgctgtcccctgaggctgtagccgccactactcctgttcccagccttctgcctaacccgaccagggttcccaaggccggggccaaggcagggcgtcagggcgagatcaccatcttgtctgtgggcaggtgagatgggcacagatgcagcaggggcaggtaaagacgtgacagcctgggggccgggagggggaggcagggccccagcttgggccctgagcaccctgctcaatgggagccctgcccttattgggcctctctgggcagtggaggcggccagagagatcaggactttccggttatgttgtgtctcacatggagcccttgcatccctagggcagcatcttggcccccatggcacccgggcctctcaggctaaggctctggtccatgaacttgctgtgtgaccccgggcacgtgctgccttctctgtgccccgggatccccgctaacggggatgattgccccactctcctcacaggttccgcgtggctcgaattcctgagcagcggacaagttc

SEQ ID NO: 518 - protein, 96 aa, Homo sapiens
MATSACAPCRLPPAPPNVPHICPHRHHLHTVQGLASLSGPCCSRCSQKKWPEVLLSPEAVAATTPVPSLLPNPTRVPKAGAKAGRQGEITILSVGR

SEQ ID NO: 519 - DNA, 2071 bp, Homo sapiens
ggctgtccgggcgctcgccgagccgggccgcggcgccgagtcgaacggggagccgagctggagctgccgcgccctaggccggcgaccaccaggggcctgaggatgaagccaagtctgctgtgccggcccctgtcctgcttccttatgctgctgccctggcctctcgccaccctgacatcaacaaccctttggcagtgcccacctggggaggagcccgacctggacccagggcagggcacattatgcaggccctgccccccaggcaccttctcagctgcatggggctccagcccatgccagccccatgcccgttgcagcctttggaggaggctggaggcccaggtgggcatggcaactcgagatacactctgtggagactgctggcctgggaatcaaccctgcctaccggactgaggatgccaatgaggacaccattggggtcctggtgcgcttgatcacagagaagaaagagaatgctgcggccctggaggagctgctgaaagagtaccacagcaaacagctggtgcagacgagccacaggcctgtgtccaagctgccgccagcgcccccgaacgtgccacacatctgcccgcaccgccaccatctccacaccgtgcagggcctggcctcgctctctggcccctgctgctcccgctgtagccagaagaagtggcccgaggtgctgctgtcccctgaggctgtagccgccactactcctgttcccagccttctgcctaacccgaccagggttcccaaggccggggccaaggcagggcgtcagggcgagatcaccatcttgtctgtgggcaggttccgcgtggctcgaattcctgagcagcggacaagttcaatggtgtctgaggtgaagaccatcacggaggctgggccctcgtggggtgatctccctgactccccacagcctggcctcccccctgagcagcaggccctgctaggaagtggcggaagccgtacaaagtggctgaagcccccagcagagaacaaggccgaggagaaccgctatgtggtccggctaagtgagagcaacctggtcatctgaggggcggtctagtctaaggacactgcggccctgccctgggaggttccgaaggcttcctggaggaggtggagctgcagctgggactgtgaggaccgagaagcaatggcccagcagacgagacagcaaagaccaaggcctggaggtgggagcgtctgccccagtgaggaggcaggtggccggcgggcactgtgtacaggagcaggctgagccccgcccctggccctgctgccatgttgctcccctgaaggatgccccgacccccgtgcctgccctggctggatcctaggagcccacgggattctctgtatcatcagaggctgggcttggcagaggggaggggcctgtgcccgtcacccctggccccattccttggtaattagccacacccttgcctctgtacagggccctagagcagatgtgcgtccccctcctcttccagcaggtctataaagggaaggggtagcagaaagtcctgggctaggagagtgagtccctgggttctaatcttgggcacatctgtggccatcgctgggtccatttttctgactgtgaagtaaggagagacgtctcagtacccagggcctcttcagctctttgtaggttctgggctgggttgtgggggactggggagctgggctctaccatccctcccattagtagctttatccagccccgtttttgctgcttccagggcctctgccttcaaggcccccatggggctgtccatccatggctctgcctacggaaggggcttaatgcatgtgcctgcccctcccccagctgtttttaatgaaactgaaaaaatagacttgatcccggcaggactgtgatacagagccctagcctgcccagccagccccaagatctcaggagctttagggagaagacttggtggggctggagcacaccttgggcctcagtggtttctgtgtccctgtggtgccagtgcttctgggcagtgcaggcggctgccaggcccagccctgacttccactctggctcagcaacctggtt

SEQ ID NO: 520 - protein, 250 aa, Homo sapiens
MPVAAFGGGWRPRWAWQLEIHSVETAGLGINPAYRTEDANEDTIGVLVRLITEKKENAAALEELLKEYHSKQLVQTSHRPVSKLPPAPPNVPHICPHRHHLHTVQGLASLSGPCCSRCSQKKWPEVLLSPEAVAATTPVPSLLPNPTRVPKAGAKAGRQGEITILSVGRFRVARIPEQRTSSMVSEVKTITEAGPSWGDLPDSPQPGLPPEQQALLGSGGSRTKWLKPPAENKAEENRYVVRLSESNLVI

SEQ ID NO: 521 - DNA, 3402 bp, Homo sapiens
ttcattcaaaaggcgcgcaggctgcgcggctgtccgggcgctcgccgagccgggccgcggcgccgagtcgaacggggagccgagctggagctgccgcgccctaggccggcgaccaccaggggcctgaggatgaagccaagtctgctgtgccggcccctgtcctgcttccttatgctgctgccctggcctctcgccaccctgacatcaacaaccctttggcagtgcccacctggggaggagcccgacctggacccagggcagggcacattatgcaggccctgccccccaggcaccttctcagctgcatggggctccagcccatgccagccccatgcccgttgcagcctttggaggaggctggaggcccaggtgggcatggcaactcgagatacactctgtggagactgctggcctgggtggtttgggccttggggggttccccgcgttccatgtcaaccatgttcctgggcacctctgggtactcatggctgtgatgagtgggggcggcgggcccgacgtggcgtggaggtggcagcaggggccagcagcggtggtgagacacggcagcctgggaacggcacccgggcaggtggcccagaggagacagccgcccagtacgcggtcatcgccatcgtccctgtcttctgcctcatggggctgttgggcatcctggtgtgcaacctcctcaagcggaagggctaccactgcacggcgcacaaggaggtcgggcccggccctggaggtggaggcagtggaatcaaccctgcctaccggactgaggatgccaatgaggacaccattggggtcctggtgcgcttgatcacagagaagaaagagaatgctgcggccctggaggagctgctgaaagagtaccacagcaaacagctggtgcagacgagccacaggcctgtgtccaagctgccgccagcgcccccgaacgtgccacacatctgcccgcaccgccaccatctccacaccgtgcagggcctggcctcgctctctggcccctgctgctcccgctgtagccagaagaagtggcccgaggtgctgctgtcccctgaggctgtagccgccactactcctgttcccagccttctgcctaacccgaccagggttcccaaggccggggccaaggcagggcgtcagggcgagatcaccatcttgtctgtgggcaggttccgcgtggctcgaattcctgagcagcggacaagttcaatggtgtctgaggtgaagaccatcacggaggctgggccctcgtggggtgatctccctgactccccacagcctggcctcccccctgagcagcaggccctgctaggaagtggcggaagccgtacaaagtggctgaagcccccagcagagaacaaggccgaggagaaccgctatgtggtccggctaagtgagagcaacctggtcatctgaggggcggtctagtctaaggacactgcggccctgccctgggaggttccgaaggcttcctggaggaggtggagctgcagctgggactgtgaggaccgagaagcaatggcccagcagacgagacagcaaagaccaaggcctggaggtgggagcgtctgccccagtgaggaggcaggtggccggcgggcactgtgtacaggagcaggctgagccccgcccctggccctgctgccatgttgctcccctgaaggatgccccgacccccgtgcctgccctggctggatcctaggagcccacgggattctctgtatcatcagaggctgggcttggcagaggggaggggcctgtgcccgtcacccctggccccattccttggtaattagccacacccttgcctctgtacagggccctagagcagatgtgcgtccccctcctcttccagcaggtctataaagggaaggggtagcagaaagtcctgggctaggagagtgagtccctgggttctaatcttgggcacatctgtggccatcgctgggtccatttttctgactgtgaagtaaggagagacgtctcagtacccagggcctcttcagctctttgtaggttctgggctgggttgtgggggactggggagctgggctctaccatccctcccattagtagctttatccagccccgtttttgctgcttccagggcctctgccttcaaggcccccatggggctgtccatccatggctctgcctacggaaggggcttaatgcatgtgcctgcccctcccccagctgtttttaatgaaactgaaaaaatagacttgatcccggcaggactgtgatacagagccctagcctgcccagccagccccaagatctcaggagctttagggagaagacttggtggggctggagcacaccttgggcctcagtggtttctgtgtccctgtggtgccagtgcttctgggcagtgcaggcggctgccaggcccagccctgacttccactctggctcagcaacctggttatttatgtggggccgtgcaggcatgggcccactgcctgtccatcctgtttctcttatttattgaaactcaccattgccctatccttgtgtctccacccccttccatgtgttgaataataaaaggtgggaaagtgctgtcacgaggagctccttttctctgtgcccttcccagcttatccgcctgttccacttgtacctgtccagccctgccctgtgttgggcaccgtgacaggctgccctcccctcacagttcctgcacctcagcagccagggaagcagggcccagaggagacccatcaactcatctggttctcaccaaagcccctagctagaggcagggctgtcccacagaaatagtgtgagccacatatgtgactttaaattttctgacagtcacatttcaaaaagtaaaaagaagcaggtgaacttaatttttttttaacccagtctatccaaaatattttcatttcaatataaaatcagtataaaaagtgtgaatgagctgtttttgcttttgctttgaaatctggagtgtatcttacacatcttgattggaactcaaatatttcaagggctccatagccacgtggccagcagctaccacactggtcagcgcagcacctgaggaaatgcactgtgtggagcccgggaggtaattgggggtgaggaagatgtgcgggccagggaatgtgttccacagagagggacagcatgtgcaaaggctgagcaccaacacatagtggtcacctgggccttatgcccagggagcctccaaagcattcagctcctgcttggccagtgtggagaggaaaggagccacaggagcgggtgctacacccggcaagacagagcgtctccatctaaaattcctagggcaagcttccaacccggcccaagggccgcatgtggcccaggatatggctttgaatggggcctaacacaaattcataaactttcttaaaacat

SEQ ID NO: 522 - protein, 430 aa, Homo sapiens
MKPSLLCRPLSCFLMLLPWPLATLTSTTLWQCPPGEEPDLDPGQGTLCRPCPPGTFSAAWGSSPCQPHARCSLWRRLEAQVGMATRDTLCGDCWPGWFGPWGVPRVPCQPCSWAPLGTHGCDEWGRRARRGVEVAAGASSGGETRQPGNGTRAGGPEETAAQYAVIAIVPVFCLMGLLGILVCNLLKRKGYHCTAHKEVGPGPGGGGSGINPAYRTEDANEDTIGVLVRLITEKKENAAALEELLKEYHSKQLVQTSHRPVSKLPPAPPNVPHICPHRHHLHTVQGLASLSGPCCSRCSQKKWPEVLLSPEAVAATTPVPSLLPNPTRVPKAGAKAGRQGEITILSVGRFRVARIPEQRTSSMVSEVKTITEAGPSWGDLPDSPQPGLPPEQQALLGSGGSRTKWLKPPAENKAEENRYVVRLSESNLVI

SEQ ID NO: 523 - DNA, 49031 bp, Mus musculus
  misc_feature (1)...(49031): n = A,T,C or G
catatcctcaaactgtaagtcgaaataaactctttctcctctttgttgctctttggggtgtttaatcacggcaataggaaaagtaactaactgatggctcacagcgtgcgtcagccacgcaagccttgtctttcatttactctgggtttgtgccttcaggaggagaccacagctgaagtcataggccacactgagagaaggctgtgtcacactctgtccatctgtccattcctactcctgacatctatctggcatgtgcctataggtgattctgtaaaatagcagcagtcttcatccaagcaggcataaactgtggagttgacagttacattggcgtgtaacaagagaatggctgtgttcattgccctccacatttgtccttagcctgaactggctgaaaaggaggagggagttggataaaactgatggtattcactagtacctaacgcaggacatggccccacagtcacccccaatgacttagccccacagatcttcacccagagggtagctcttgcttgcatggtcattagcttggtgtgctgaagctgcctgtggaccatcgggaagatcttgatgtagaccaaccgcactgtatgtaggacatactcactcacgaggaccacatttgggaagagacacatcatgaaatggagttttcaccacaggccttagtcatactcttttcactttctaccccagggataaaatccatttaaagccaaagaaatgcacagacccacaggacagcaatgagcccttggaagagctcaggatccagggaccagttacctaacggggtgggctgctacagtggctctgccagagaccccagaaagtggttggcaggtgtctgcagcacactgcacgtgcctgcttcagtgtacatggcatgctgcccaccatcaacacaatggcaacacaaaaacacagatcttgcctcacagcaactaaatgagagtttattctggagccaaataccagtgtaatggaccagagaacacagagaaggttaccccaaattccatgctccaaaggagtaacagtacggaatttttacagtagcggaacaaaatgaccagccaaggcactgttctgatgtgttagtagaaacttcgggtaggcaggttacagcaaaggagagcaatacctgctataggcctcaggctatctgatggcagttcttggctgaaggtgaaagctatgcatatgtttatacattccaaagaggactgtgcctgatagccacaagggtgtcaggtcaaatgcaaatgtgggcaataaatggctatttagagggttaaaggcagttcaagataatttaactctaggcctgcaacattccacttacccatgatcatttaagtttttatcagttagtcagcttgttagaatgtttaacatagtttcggcttttttattttaatttctggaattttgattcaaagcatcaggcagccctggcacaaaggacagcataccccatgtttttggctgcatattccagtaaccccggtcacctatcccagcctaagccaactgagtctggtggtcctgtgagatttaagcaagacagtttgaaaggctcataagtctgcactgccaagtggacccagagtcttgcttccttgaaaacaataaaattaagatagacataacatagtggtttttagcctgtgggctgcaacccccttaggggtcacacaactatttcacagggatcacccaagaccttcagaaaacatagatatgtacattacaattcataacagtagcaaaactacagttacaaagtagcaatgagggctggagagattgctctgcagttaagagaactgactgctcttccagaggtcctgagttcaattcccagcaaccacatggtggctcacaaccatctgtaatgggatctgatgccctcttttggtatgtcttaagacagtaatgaaaataacttttggttgagggtcaccacaacataaggaagtgtattaaagggttgcagcattaggaaggttgaggactactgatggaccacctttagaagcccttcaagtggatctctgtacccaagttcactcagtggctcagatcccacagacaaaactctccactttgttcatatcatttccaatagcaaagttacagatagcctacgattccagaaaacaagcctgctgggttggtaagaaataaattgttactcaaagcaggaggtcattataacattttaatagctgcagtatatccttgggaaaatattatttcctgttaattttacagctggctttttctgtgcctgttattccagcctaataaacagtagggaagatttttacaatccaacctaatttttaggttgcaagggacaaacaatggaggaagtgagtaggcaggaagaaactgaaccgtgagcctcacaaagcaaggcgagaccattatgttgaagacaacagatttaaattatgaaactgtccaacaaagtagccctagacacaaagtagccctagacacaatgtagccctagacacaaagtagccctagacacaaagtagccctagacacaaagtagccctaagacacaaagtagccctagacacaaagtagccatttgcatgagttaaaactagtttcatttaaaatggcattcatttagggtgttatgtgtcatttgtatcaaattcagggcctttgtcatttgtatcaaatctaggcaaacactttaccactgaggttctactatgaagtccagtctgacctcagactcatgtccctcccatctccaactcctggaacaccaaggccgcctacaatttttacttcttacatggcatttagccatgtgtcaagtcgtcacacagttacaacggtattggactatgaaggtagtgaacatttttattattgcttaattaagttggacatactggcgcagacctgtaatcgcagcacttgggacacacacacacacacacacacacacacacacacacacacacgcacgcgcagcttggatttgacagcaggacataaggcgatctgagtgttgactagcggaggagcaattgcagacaacttagtgttctttctaaaatacaagctagctactgtgtcatttatgcgtccttagaaccaaccagccctggtttagagcccaggctccacctcctcaccgcccggacccgctgcggaagacctcctctgtctccaaactccaactcccaatatgcccttctgcgacctcactctccgactttccggaaatgtagtttttactagggcaaagcacagcgcccaagcctctgccttccgcccctctggcgcttagtgcggccactgtaagtggtcgaatgcggcagcctctctgcccttcgctgctctgaggctgtggggagacgcctacatccgagggaaagccctagggggccgcagtggcagagtggccacaaccactagggggctacaaggcagctaagtctatcaggagctcggggcgtgctcgctggaaagcgcacgcgcaaatacgagcctcgctgcctcggtaaacagcaaaaaggcgcctgcgcgatgaggtcctcgagttggacgcgcgggggcgccggagcaaagataacagtaacgtgtagtaatggatctgtccactcatctttccacgaaccttttattgtttgcaaatcacagccccccccccttgccttgaccctcacaccggatttacaaagagaattaaggaccagagtaggatttcagagctatagcccagcctccacttttgacttgctgtgtgacttgtgtaaattgcttccttgggaacctaagctttctcatttatagatggaatgagcttgttggaaagatcaaatgagacccaaggatgaaaatgaaacccccaagcagtctgtaaaggcagacgattattacagttagttgattgcaggctgagagacccatttcctcttttttgcaaattgcaagcctgaaggcaccaaataggtccagggctagcccaagtcactatgtgaactgggactagaacccagccttttttgcctttgagcctggagctcttcttcacaccgaaaagactagcttttattgggtgtacatttagtaagcccgcttgaaaaggtgagtcactattccacttctgacccaactaggcatgagggaggcctggctactcaaagttgaccaacagtctcaggaagcaaaggaggatctgaacatccaggaaaaaaaaaagaaaaaaagaacagtgtagaccgacggttctcaacacgtggggtgcaaccccattgaggttgcatgtcagatatcctgcatatcagatatttatattatgattcataacagtaacaaaattatagctctgaagtagcaatggaatacttgttatggttggggttcaccacaatatgaggaactgtattaaagggttgcagcattaggatggttgagacccactggtgtagctggagctgtgtaaaccctgcttctcaaagtagtatcccaagtacggcagataaggtgcatcaccaagggaaatggactcgaaatggacaggaatggggagggcccctgactggggtgtactggtgtgtaagctgtgatcacgttggttggggccagcagcaactagcaatggtagtggagctggcctggttgatgacaggaaatatttcacactgaaatgaggctttaagaacctctgggacatgtagaggaataaggtggcaccatggacacacagggcacacacatgatcaagcagctgtccgctagggaagtacacttttctatgtctctctgccttnnnnnnnnnnnnnnnnnnnnnnnnnnnnnnnnnnnnnnnnnnnnnnnnnnnnnnnnnnnnnnnnnnnnnnnnnnnnnnnnnnnnnnnnnnnnnnnnnnnnnnnnnnnnnnnnnnnnnnnnnnnnnntgggagtcactgaggtctggatgcatacggggccaccttgggtaactcaggaaaggtaggtacatgtagaaacagaaatccaacatctgagttaccttgggtaactcaggaaaagtgggtacgtataaaaacaaaaatccaagctctgtcccacccacctccaaatgtctagtcctgtggcccccactgattgatttttcagccaggaaaccaaagctaaaggcaaaggaaggctggggatgcagctcaattggtagaatccgttcctaatgtgtacggagccctggattcagtccccagcactgcataaactgaatatggtggcatattttcataatcccagtacttaggagctagagagaggaagattagaaacccaaggtcagcctcagctacacagcaagtttgaggactacctggcatgtgacacataagaccccctcacaaaaagcatgagtgggtggagattgtgtctctctgtctcgctgtctctccctccctctctctttctccctgccccccatttctttctttcttttccttctttctttctttctttttttttttttgatatcatttttttttccgtgacagggtttctctgtgtactgtgggtttccctggttgtcctggaattcactctgtagaccaggctgaccttgaactcagatccaactgtctctacctcccaagtgctgggatcaaaggcgtgtgccaccaccaccccaggattccctttttgagatggtgtattatgtagcccacactggcttcaaacctgaagatttcttccttcctcagctccagagttctgtgtatgcatgtgcctccacatcagccttaagaagggactcacttaaggacacatatgagttgggacagaattggactaggatggagatctttccattacacggcagtgatcaaacatcttcatcaatcatttatggaatatctaatatatactctgggaagagctgtctgagagccaatgggagccaggcatgcagtcagccccaggttttcattaactctcacggtgttaatactgtaaccctggataagtcactgccgccttttcatgtctctagttgtctctaaagtagaggtggcaagcatcatccagggctgtctggagggtgaactataaattaaatgagttataacctgtctagtacaaagaacagcaccaggcatgtggtaagtaatgagtgctggttatcactgcttccagggaagacaggttgtggcaggctacagatggtgttcttctccagccagccagcagccccgtgtttgtgcatctcctccaaacttttacaacatgcctctgggggccaacatttctggaagtaaaatgggaacttaggctttcatgtcctcttctgtcccagggaaagagatgtctggagtgttgacaccagagagttcacatgctctgcccacctcccaaggcctagagttaagaggattctcgtctcatgttgaatattgtatttctgaccatacagggaccagaccctggactcagtgaaggtcctgctaagtgtagggatagcgaggggtcttcctccctgcaggcctgtgttttctgtgaatagagcaggctttggggcagaggaggatgaaagaggtaggcagacaggagccacaagacattaaaacttccggctggtgagatggctcagtgaataggaacgccaactactcttccgaaggtccagagttcaaatcccagcaaccacatggtggctcacaaccatccataacgaaatctgatgtcctcttctggagtacctgaggacagctacagtgtacttacatataataaataaataaatctttaaaaaaaaaaagacattaaaacttcatccctggatcaccctacttgaaggtggctagagtcttggcccagtggtaatttaaactttgctccaagcctttctaagtaatgatgtggttcaaactccttacttagaggaggggaaggaaagtgcaataggccaacgggagggagtccggtgaagaagcagacctcctgccttcaggtgtgggctctgtcgagaagccagatgggaggcacttggttccaccccttctcccctgggaaagagcccccaagatgaccacacagccagctcagtgactctggttgggactagagaaagctgagaagacagaagtggggctggagcacagaatctgatcgagaggcactctgagcgactcaggcaaatgggagcagggaacccttcttagtctaggatttctgagggatttgggggcctgtattcttcagtctgtggcagtggaggataaaaatatcgtgggagcacactcctggaggagggagccaagcagattcagaaatgagtcacagaaccaagtcctaaatttagaaggtgctgagggaggcagcctcctccagggaagacgtggagatgcccactgacccaggactccacagacttgaggcaggaagagtcccccaggcagcagtgtcccacccacagcagccgagcctactagtgggctgagcctacttccaggactagatgtaatatcccaggatgaagcctgacctagaacctcattctcccagtagaggccctaaaggggttcacccacaccagcccttcacccagcccgagaaatagccttctgtgccctggagtgggtagggctgggctccctgtgccctgctggcaggtgctgtgtgaacataaggttggaggtaggtagacagtatgtcagcatccaatgtgcacttagtgagaagtcactgtggtcagggcactaagcttagcactccctgctcagtgactcgctcccctgtaatagtgtaaacctcatccgtctacacccttagaggcaaggctgtctagacggactgaaggtaagctaactcttctagatcctagcacggagttattgaggtcctgacctagacaggctggcttccttgcccaagccactttcctgaactcctaatctggtaacttctatctgcaggccatttccaatctgtcctctcgttcctgtgccctggattccaagggctgcccttctgaactttgtagatttctgctgcccaaggcatccccaggctctgaggagagagaatactgtcccctcgatgaaggacttcacagtggacaggtccctctttcggctctgctaccacagtgtgtggaaactgtcttgagataggataagaggtgcagttaggactctaacagaaccaaggcaatgcttccctaccctcccacctcagaaaggatccagaagcatggatggtcaccacacctggggctgctggggccctgctgacaaggtcctgacaggtcctgcaggaactcagttcgattgatagttggtcgatgtagccttccagaagcccttgaatttcctattagaggcactggatccatctgctgactctccctgggctctgtgctcaggctgggtggtgagggatgtcaaggagaggattgtctaggcctttttctgctagagtgggcaaaactccctggtgtgattatggcccctctcacatcccacccaactccttcatttttttttttaatctcaaagttgggtggactctgtctgaggccctgggcagggcagtcatcaccatgcagaactagagaggcctctggggagggctcagggtgatactatgggtgtgaccctagcctgacttcacatatccaggggacctcaagatgaggcaccaattgtagattttgactattggtttattttccttgcagtcaaagggccctaggtccctgcctaaccatcagcctaaggttgttgtgggactgagacagggtgagtctagtcctaccctgggcctggagcctcttcacatgtgcaggatgtgtttgtgcaccagttacgtgtgcacactgttacttgtgcatactgttactaactgacatagcaggcacctgagggctgtggaaattgctgtatgacgatgtggcactataaggtgggcagtgcaagtggcagttccttagctgcaagcttttcagatttagcaaatattttggatgtatttgtagtaaaagctatttagtgtgtgtgcatgcatgcatacttgtgtgtgtgtgtgtgtgtgtgtgtgtgtgtgtgtgtgtgtgtgcgcgcgcgcgtgcgtgtgtgtgtgtgtgtgtgtgtgtgtgtgtgtgcatgtgtgcgtgtgttcttgacatagggtctcactacatatctctgactgacctggaacttactatggagacaagctgctctcaaattctcannnnnnnnnnnnnnnnnnnnnnnnnnnnnnnnnnnnnnnnnnnnnnnnnnnnnnnnnnnnnnnnnnnnnnnnnnnnnnnnnnnnnnnnnnnnnnnnnnnnnnnnnnnnnnnnnnnnnnnnnnnnnnnnnnnnnnnnnnnnnnnnnnnnnnnnnnnnnnnnnnnnnnnnnnnnnnnnnnnnnnnnnnnnnnnnnnnnnnnnnnnnnnnnnnnnnnnnnnnnnnnnnnnnnnnnnnnnnnnnnnnnnnnnnnnnnnnaagttcacgtttcactaggcaccttgcatatgcacttttcatctggcaactttgctctgatggtgtgtgtaatcgtgtatgtacatgtccttgtgccaagctggccatttttgtgactgaaatgtgtctatgtgggactcagataaggacagcaagtgataatatatggttgtgactgtcaccacgaatgaggatgtgggtgaccttgagtgactggcttagtggctgtggctccctcggggcagctttgggctgtttgccctgcagggtgtgagacccaccctgagtaaacactcagatccggaccttgtggggcttggctaaagctcctttatcactgtaataggacgtggccttctcaaggcccagcctaccttggaggcctgagggcctaggaatggaattacctctccactctatttcccagtgatgtcacacaagtcactgtctggtcttctagaacagtgagctcagggcacactgtgttgccatagacaacttcttggcatttactccatccttagcggcagacagggctaccccaggaggaaggtggggaaaaggggcccgtgggggtaatttatcatccaaagacctccgtccatctgtctgtctgtctagatggtgagtaggagtgggcactcagaacttgagtacactgagcctgggtgactgactcatctctgccaccctttggaggctgaggtagaactgactcaaattctaaaaccatcctgctagatcagagttagaccattacagagctagaccatgtcacacacatacacacaaacacacacagagagagagagagagagagagagagagagagagagagagagagagagaggcagagtggcaggctctgtgtatgtggagggttttgttaatgtaacaacctggcaagttgtcaaggttcccccaagtagaagagatggtatgtaatgggcttaagagctatctcagaccaggagaactgggtctttttttttctttgttttgtgtagcccaggctagcttcaaactccctatgtaggtaaggatgactttgacttcctcctgaaccttctgcctcgaaagtgctagaataacagacatagtccaccatacccagcttctggggttttatttccaattctcctgatctttaggcctcggtgtctccacgtgtcagggtgggtccagatgatatcagtctgaaggtctctggagctggtgcagggagttgagagcattagggagcaggtaaaggggattagctagctcttggcaggttctgcatgacacccccacacacacacaccaactgcctggtcaaaatctcagtgacctctgcatctcccctattccaggagcctcagtgctgaggagctgaaagtcccctcaagcacttgccttctttatgcaggtgcaagtgagagccagggtcgctcagggtctgccctgaaccccgagtcctcactttccctgaactccccttgctgattaccccctcatagaaactctaatctccgtagcccatggcacctgctcagtgacaagctttttggagctgggagccataacagtgccagcccagcgtctgagggacttacagaggtggcacacccaccttgtgggtagaccctcactgtaggtaactgaccaggcacagcaagtgtctttctttgctagcctttgcactgtgtaatcttgcaccagagtctaactacaccatgatctttccttaaccttttttttttttaaccaacgagttttggacagtaagttctcctctgctctacccatcctctggctgggttgtagttttggttacttgtctaagggcgaaaggcacctatacccaagcccaaagcctctgttattgtcattctcaggggttaatgttccagatgaggaaacaggggtgtgtgtgtgtgtgtgtgtgtgtgtgtgtgtgtgtgtgtgcgcgcgatctgcttctaggcacagaactaagaaatggtattgtttggatttgaacccaggtccgtagcttcactcttcttatctctcttgcttagggatgtggtgccacaggatttgggactgctttcatgttcaggaggctgtcaggagcctcagagccagggacatctaaattcatgggatggggatccaacatgggcaaattaatgtgcaggatgaagtgacatccttctacttgtcctccggcaggtcacctgctattttggaccctcaagacccaaaatatttgctcttaagcttggctcctgtcatctgttcctcactagctggctgttttcccctcagactggcacctcagggccggggaggtcctgtcagtttgtcttcacagccactttctgctctcaccccagccttatctccccaccactcaggactggaggtgggcatgagaggcttagcattctgatgctgcctgcaacctgccaagattggggctatcagggctcaaaaagccatcaggctacggttgctagctatctctacctcatggccagtccctgaagatccatctcacagagcaatctttggctttgctgaggtcccctcgggcctcctgccagcctgggagtattggtatcacaaacaccccgaggcttggggaaggtggacttgggcagaggaggttcaaagagttcgtgtctggggcctcccaagcccaaatccagcccccaatgccacctactcattcccagacacttctaaagagtgtgggttcagagggtgtgcgtgcaattagctgacacttcctaccacactgatggaaggcctgggtatctgaggtcattgcacaggactgatggggacctgcagttttgttttgttttagaagacttactttgtagaacacctttcagggccactttgtagaacacccatcatggctacctgtttgcccctgacttattttttatttttttatttaccaatgattaaacctagggctctaccacaaagttacagcctccctaactatcctggaactcactctgtagaccaggctggcctcaaactcagaaatccacctgcctctgcctcccatgtgctgggattaaaggtgtgtgccaccactgcccggcagcctttaaaaacattttgggggggggggcaaagtcttactttgttgcctgtgctggttttgaacggaatatgcagcccagggaaagccttaaactttgggtcttcctccccagtctcctgagtagctgggattataggtctgtgctaccacatccagtttcctgcttattttaaaagtgggcatgatttacaaagatctcagagccctgagcacttcagggaaaaaaaaaaagcacatctatttgtgaacctacagtgctgagtctgcggttttcttttaacacctgtaagaaaagaaatctacatggtggagataagaggtgacttctgagggaccagggggagaatgcagagggcacagaaggagcctgggtggcagaggcttggtactctggcactggtgggaatagccattagcagactctggtactactaggtcagtggtagtcacttattgctcctaatatccagaggagcacaccaaaggctttccctgctcgtctctggcccagacagtgacaagactgccatgctcatactggcctggccctagctttcactgggtagatgggacagggctcccagaatggaagagtaggcagaagagttagtggacagaatttacatcaggctacagagtagagctctggtccactctattctacagaggggtggagggggcctgtgctccagtgttctgcagccctgtgcttttgagaactggtcttcgcctaggggaggtgtgggtaaatggctgagagctaaagaggggtgggtttggaagctgccaaatagggatgtaagaggttgctggctcaggacctctctctggccagagtgaggctgaagtggaaattttgccaaattctggccagcctttgaaccttgagcctttaaagtcggatcaacttccggctgggtttgcacaccctactggaaaattgagttgggtgtgtggaggaggcttgttatgctcttggttcttggggcttgcaggctgtcgccatttctaatttagttactgaggggctgtcatccctattcctgctagttagtctttcaattgtcatgagggtgtgtgcccacccttgaatctctgaagtgttgtgtgtgtgaataagctgttgcagaagcgtgtacctgcaagggtgggagcgaagagtagagaagaggctctcagttaacttccagaatctctcttggcacctcaaccttactctgagagcccaggctactttgttacttcgctatgtggttcctgctcacaggtccccggtcctctgatagtctacatctctccccggactttgccccttccccggggcttacgggggcgggcgctaggacccggcggggcggggcggggcggnnnnnnnnnnnnnnnnnnnnnnnnnnncacccgctacgcagcaatcctactgccgctccagggcaagtatgaggtcgctccttgtgggagggtggcccaagtgactgtcctgtgccggtgcacaaccgcctggggccagtacctgcccttttcaagctgtccgctggtccgggaccccggctagccccacccgcgcccccagcgcactgactctggtccccaaaccggtcttgcaggtcccaggaaggtggcgtcagcatctgcagccgcgtcgacgttgtctgagcctccgcggaggacccaggagagtcggactaggaccagggccccgggcctccccacgctccctatggaaaagccagctgcctcaacagaaccccaagggtctcggcccgccttgggccgtgaaagtgtccaggtgcccgatgaccaggacttccgcagtttccggtcagagtgtgaggccgaggtgggctggaacctgacctacagcaaggccggcgtgtctgtgtgggtgcaggctgtggagatggatcgaactctgcacaagatcaaggtaggattgccctgtggtacctgcagcctccactcctcccgaactgtctctcacaggaatctcctcgcccatactcagaccagggacccatagaggggtgcatgtgagctcagagtctcctaatataaaccagaggacacacatgggccatatgacccgggttctaacctaggcatgcctgtgtgtttgggagatgggtgatggccaggtacacttaggggaatagtgtctctcaaaggtctgtctttcagagtagcttctgcttggacccttagtttgacccactaggtaggtgaacggcccacttcctccttcacccggggttctctagcccgcgatgggtcttctgctctactttctgcactcttgggtgcagaggatgagattccttccttctcaattcctctagtcctctctgtccctgcccagtggctctatcaggctctgagcctgcagcaggcctttaggactgtggctggcagctcctgactgctgtcttgccctgagccaccctgggggtgcactagaggaggcagggtcttagtgtcaagggaaaccagctcagaaggcagatacgtactcatcagcccctcactgccatccccctcctccctgccccatgattctcttctctctgtcatggcagggtagcttggggtttgatggaggcagagattctggtctagggggtctcagtagctgtttgttacacgtgtggtttggttgtgagtgccacattgcagggtgtgaacttcccccttagagagctcttggaaggccattcccttgcaccctcctgctgctctggatctgtcacggatgcattcctattcttagggtccagggcactggactgtcttaacagggtcccttctgtctaggacctttataccagagcctgaggtgctggcctttttcctctggccctatgcttctttttgccttgccctaatcatttatagctttatccacctgccccccccacacacacacaactggcttgctcttcctgctgtccctttgccctctgtgtctgtctccgtctgccctggctaactgactctttctgcgtttccgtggctacctccttgctctgagtctcttcccaggcttaaagaccctgggctggagcttcttcaaggcctagtataggtctgagcctgaggagcagggcgggcagggcagctggcagtgtcagcatgttgctgattgcatgtgggctcctccccacagtgtccaccagggtagtggtgttggggaaagatgaacctgggaaccgagtgaaaggtggtgggctgactgagataggctgaaagccagcagtgtgcagaagctgggaagtttggcttcccccccacaggactggctcgtgtgtgtgtgtgtgtgtgtgtgtgtgtgtgtgtgtgtgtgtgtgtgtgtatgggggagtgtgtgtactcccaccctttgtcaatagggcggagctgcctcctccatctggcttggttaatgaataaacccagccttacccaggactggagttggcaggtctagagaccaggttgcctcaaacagacccctgtggctagatcaggcttgggaagggagaatatttgaagaagctatggtgttaatgggcctctgggcaagacagatgttctctccaacataccagttcagtgctttacatactgaacaaaggctaaagtattagacagccttttgtacaacctgctttgtaaccccctcctcctacaacaggatgcaggccaggatactaagaaccagagaatgccagggctatgcacgtggctaaggagagagagggagagagagagggagagggcacttagagttaacttgggttagtctccacgtctaatcttgtctctaacttttctcccatactgccttagccccatttcccgcagtagaggaggaggtaagcagaacctaggcccagggaggaggctggcaccttagttataggtatcaccagtggccagactccatgcctggtcctctcagcacagcagctagaactctgggagatgagctgaggtctctgagctgcctatccccagattccaggacttccagttgccacacagttagcctgtttctgataagcgccctgctcccaggcaagcattttcttttggttatctgatttagcctcaggccagtcctggggagtctttggtttgtctctgtaatgttactatgaaagaaacaaaccaaaagaaagctgagcctacaaccgaggcaggcgtgcagcccaggtcagtatgctccagagttgctggccctctctgatgaatttgcattcttgggcaacactggcctttaaccctatcaataactctttgaaaaactaaaggacgttatgttctcatcctcctactcttgtttgatggatgacaaagctgaggcccagaggggtgagtgactcttgccaaggtcgtacatcaggtagaaaccagagtcccagggatcattgggtcattgcaggaagctggggcttaacctcagttgtttgttgaaattctgtttcccctcttcccctttctagcccctctcccctgcaccagggcatgccctgtgcgtgctctctctctctctctctctctctctctctctcaaaggtccctggaagccaccatggctctgggcccagcagacagctaggacaaataaaaggggctgatggaggcctaatcctactttttccctccctcctggcctctggcctgctctggcttcaggcctgcactgggccctgggttagtggacaggaggcagacagttcctcctgcatgtctaggcgctgcaccagaggcagatgctgagtatgaaccccagagccaaggcagagggctgcttagaactcagacccaggtttcccaaagcccaggcttgaagacatctaaaatattttttcagtcattcaaccagggaatcatctagatctgcatctttttgctttgtgtgactgaagcacatcccttctgctctctgggctgtctggtcacctgccattggacctttctgatttaaaggacttctgaactcagtggctaagccagggcacacagggaagagaacagggcagctctggcaagcatgctctggatgacctgtgtgcaagtcttctgatgcttactgtatgtcttgctatgtgcaggcagaggacggctcctgggttctttctaatgctttcagaacttgctggagagaggaaaggcaattatgggtgcatccagacccacagggcataggtttgtaagcagcaggagtgacccaagaaggaaccagcacctatgacaagagcagactggtgtcagtatcgctgagggcttggagttagaacatcagtgagagttcctgagagcctcttgccacaggaaactggttaatagggacttgtctcctgattcctggtcctgtgggctttccctctcctttggcgaaagctctagatatcctctcctggcctggactcactgtctgtctgtcccatgccacaggcacttggcgtacagtcttctcaatctagtgtcctggtcttaatacccatctcatgaacaccacattctcctgtgacatatggctcatgcagggatctctggggaccttccttacctttagagtctgggactcaaagccatcctgggaaagacaagggtatatagggccatcatcctgtgaggtaggactctttggtccaatggagtagatgtggaaaatggaggctcagagcaggggtccacctgtacaagaccaaacagaagtggctgaagctggacgagaactgaaggctttgcctccccctgccccaataaaaattgtcttctcggctgggcatggtggcacacgcctttaatcccagcactggggaggcagaggcaggcggatttctgagttcgaggccagcctggtctacaaagtgagttccaggacagccacggctatacagagaaaccctgcctcaaaaaaccaaaaccaaccaaccaaccaaacaaacaaaaacaaaaaaccccgtcttttctctgccgctccacctagttctttcagccctgtgagcctttctgtctccagaagcccatggagattcacctgctgtctttgggtctctgtgctgtgtcattgtgagaggataccttggagggaacccaaatgggtaaaagtccagtcctcactgtgtgatctgaagggtcacttcgcctctctgggtctgttttcttgtctgtgagggcaaggctgagaggtgatatggttttaggagctgggggagttcagctcctggtttggcctttgcttctcgagggtcagtgagtccatctctacgggaagttgcagggcaggtggtttgtagaggtgatccttaaccttaggccaggacggtgatgtgagtgtactgcagggcataggtaaggctggtcaactaaggcttggtggtctatgccagcaagaaaggcccctaggtgagcactctgaatccagggatagctccgaggagtctcccttgacctgactgtcataggagtcctagaagaagaggcctccagagatgtcctggggaagagagttctagagaggttcccagggcgttaatagtgtgtactatggggaagatgcactaaaagggggggggggcagtcagcagtggctgggggtgttgaggaaacctttctggcttgaggtgcctgtttgagttgaagagagagaacacaaagttcaaaatgttagctgtgtggctctgggctgcttctacttcctcctctgtttgacgtggacagaagtatcggtttgcctgtgttctgtcacttcagttactcattcagtgaacatcactggatagcctctccatctggacccgggctggaagtaggggacagccaggaattgaagggttcccagttgaacccagagtggccactgagccagccagtcctgaagtacaatgcctaggtggtggctttgggattgagggagaataggagtttgtcagcattcagagtgctctggacaggtacaaagaggaggttaagatggaggagacaggacagggcattggaggagttgccctggttgagaatagggggtagaaagggattagtgagctaggccaggcctttggctttctggaactaggggtcttatggtgccagggttttgctgttgggagaggctgcacctgcctgggcagtggtactgagtctgtgccagagtagaggctgaggccagtgcagcttgggatccacccagagggatgaggagggataggaaaatgaagtgcaaactgtgagcgtgctgaggtagaagatggtgggatgcacggccccttgtggcccttgctgtggcggtgagtgggagagtccaggttatgtccctgtcgggggtaggggagtctacagttcctaggctgacttagtgccctccacacccagttccccaggctccagcttttaaactttaacgagcctcagctcagtttccagccgagagtgtttaaagtttcaggagatgagagaaaagagcagtcctggagacagctgggtcctctttcttcccttgtgcctctgtgcctggctggaccacctggagccagaggcctgggtaccatgaccctggagacttggctctctgtgcaggtctgagacctacactggacctctctagagtgttcccaaaggcctgggtgccaggtcaccagcaagcatagatggggatagaatacagtcacagcccagaccccttacctgggcagatgatcatcctctggccacaggaggagggacaaagctcagagtaggggtcaggttggcagtgttcccaaccctctcagcactctttgtccccttgtagcatgcttgtgttgttgtagatgcgataggtccctatagagactcaaagacatgggattggagagtcccgtgccaaatacacactcttgtcacttgccattaaatggagcttgtggccagtggctcagggcagctggcactgttttctgaagctgtgtgtgtgtatgtatgtatgtatgtatgtatgtatgtatgttttatgtgtatgtgcacatatgcatgcatatgcatatgccatggcaggagtgtggaggtcagagggcaacttgagagagttggttctctccttttgccatgcacatcccagatgttgaacacaggctcttagtcttggtagcagacgccatctcactggccctctctggcgtaccactgctttcctgtcttccagcctgggctcccagaaggcaggcatatgccacatctctagaatctttctgtccttgggcaggtatacagtatctgcacaggtgggaagtagggctaacacctgggccatttaatcttattaggtttctgtcacaatgcttatcagtgctggctcccaaaggtcccttcatcattccctggtccccgctctctgtctttggacctttctagatgtcccgggactaggaatgggtgagaggtgataagacttgctgtagagagaggcctcgtagctagagaggatctgcatccccggtgtgtctctagcatgtgtgcattcaatacatacatttaatcacggagtccatacatttaaagagtgcatacttatatgccaaggatagtgttctgcgggaatttggcaccaaatcacacttatcagaccctgttgttatgaggttcatatcctgtcagggagccaagcaaaacagaagcaaacagctgaagaagataccagagggtggctctgttctaagcacagggtaatttgatgggggtggaggattgtgcgtgtgggtttctgtgtatggaactgtactgtgggtggctgtgtgtgatacagcctttggatgggcggactgagagcccctcacaagcaggtgcaaggctccccaaccccaagcaggcatctgagatgtttgggtcattccacactgaattcatgtgtgtgccaagtgtgagtctctgtgtttctgtgtctggcattactgtgtgtgtgagtcacaccccctcactgcaggagcagagttgtctctgatccaattatgtctgctcagctgtctcctggcagctcctgccccctggtgcagctctgcctctgccatggcttctccttcctgctgcttctgaaagcctctgtctgcctctggcttctctctgggtctcgggatatcccttttccaaccttctcttccccctgcctggtaactgcctgtgtccctgatgctctgcttggtcctcttctcccccgccccactctctttcccccttgtctgggttgtgtattcatttagcgagcctcctcttctgctgtctactgactgccagctattgtgttgtggatatggagacagatgagacctaggccttctcctccagagactccagacctggtggagagacggggaaaaccttcacaggagtgctgggacagagacttgtgctgagactagtgaccacagacagcctgaagatgggagcagggtgtgagacaggacttccacagggagcggtgcctaggcctagccagatgctggaggtctgtgagcacctggatgcagcagatgcacacactaggcctgacagttggattttatactgaagcttggaaagggagaggcttctgagcttggcagttctgttgtcagttccagggcttagaaacctcccccgtcaggggaccgattgactgggaacctggagacttgagagggggatatggatacagaggccaagcagggatggggcagagagggcttgcccagaaggaaggctgtagttcaccagggctagggagaaaggagaggaaggaattggtttagagccaagcctgggttccaggcactggagggaagcaggtacttgggacagctaacgagtttgtgttggacatggggaacccagtggcttggggactgaggtagaagtccagtgcttgctagatctttagggctcctaatccacggtggtccctgacaccaggggagtgtttgttgttatccgtctcagtgtccagttgtgtctcacatcaccagtcccctgctctatctcattttcttctacctccccattatacctctcgtttccagctccccctccctcctctgtctccccctgccctcatggtaagagcggaaaggcagaaggattgaacatgaggtcagcctctgcagccttgccttcttcatctctgctcagagctgagcctgctgctgaagctgggggtgggggtgggggtgtccatggaagctgcaggagaccagtgggagggagggcaccaggcagagcccggatgagtcacccagccctggatggagagcagcagagaagggcctgggtgggactccacaggaagctctgtatacagaagacacagcaggacatctctcctccaccagtcttggggatgcctgagaaaagttgggtcgcagtaagttgctgccagacagaccccttcccttcagaggagaaggctgtgaggaccgatggccattttccagtgagactactgaggtggaagacagggacagagactttttattaggccgacagatgtgtgttctttacagatgtgtgagccctccagtaggctcaccccaagcaaaggtggccccgagagcccctcttcattcctcacatgccctataagctccagcctctagcatggacagccctcatctggctaagtgccagcccacctggcattccctggttctctcacggacttagggatcaggcttcggggtagactttgggttacactggctctaggcaggttcctccataccctttttccaaaccgccattcactaagggatactgacttcccagagagtgggcaaagctgtccagccactagcacagagcctggtatggcaggcactccattaacagttgctgaatggatgaatgaatgagcaggttgagtacccaagggacagctccgtttcctgccttatccttgttcactcagggtgactcaggttaccacatgcggctgcatgtgccttcttcccaaagccagcaggttctggttcccggcttgtaccagtctctgccaagggccttttcccccttccgcctggatgccacctgcccatctggctttcctttaagatttggctttgctatgttttcctttgcctgtaggtcctcttccttctgtctctgccttgaccctgcagggtcatcattgcctgcttcctgccctggcccaggagtgagtagcctaagacccctctggttcttacttctagcacagtctctttggtgatcagtggcatacaagccagatactgctgagcatttccaataacttgtgtcagcccacagtgtcaggcctcagcctgggtgagcctggactctcaggtccagggacatggtcttagaggctctggatagaacaccttcaacttcaacaagtcctcctcctcctcctcctcctccttttcctcttcctcctcctcctccttttcctcttcctcctcctcctctttctctttctcctcctttttcttctcttcctcctcctcctttttttcttctcctcctcctcctctttcttcttcttctcctcctcttcctcttgcctcccccacccccacccctatcttgagacagggtttctctgtgttgcccaggctgtgctggaatttgctctgcagaccaggctagcctcaatttagaaatccacctgcctctgcctcctgtgctgggaataaaggtgtgcgccaccaccacctgacctggacagaacttctaattaggaggacaccaaaatgtgtttcttcacaggtcttactatagccaggctgacatcaaactaatttattctcctgcattagtttcctatgcactgggattacagatgtgcaagatgaaacagtggatttaaaaaaaattcataaatattatagcaagagtaagaattcaaaagttaaaacctggcacatgcccaaaggttcaagaactaggtatgctgaggcaggaggatcacgtaaactcaagagtttgaggccagcctggataaacagcagaagccttgtgggatagggtgtcagtgcgagagaatgaggggtggtatatagcttatttggtacttggtagagtgcttgcctggcaggcacacacatgaagccttctgtttggttctcagaactttataaactgggtgtagtggtgtaatcctatgatctctgtactggggaggtgcagactgggggtgggagggcagaaatttgagatgatctttggctatgtagcaagtccaaggccagcctggtctacatgagactgtctcaattttttgtttgcttgtttgcttgtttttaataaaaaaccagaccagaccaaaccaaaccaaaccagaccaaaccagaccctggtttcccaaaggggccatcccacaccccttccagctcttttctaagggtgcaggtaatccatgcgttgttgacaccatgcgcagtttgtgtgctgttgtgttcatttaaatctgcatgggtagatgttgctcacatcactggagttattaattcatgaacagttctggcagctgctttccaccaggcctgctctgggctctgagggtttgcccccctcccccgtcctgggggtggggcagggtggacaacacagcccttgatggctgcacagtcctcagggtgatgtgtcattctgagcggaactggccttgcttatgctgttctccaatgtaattttctaattacaaattcaataatacactcatgaatattgtaacagaacttttcttattttattttttcctgagcttagttgttttttttttgttttttttttttttcctgagtactgggcattgaacccaggccctcatacaggctaggcaaacactctgtctcagttctttgtgtgttaggtgcacatgcatgtgtgtgtatgcacatgtatatatacagaggccagagcaaaatcttggctatcacacctcaggtaccatctaccttgctgctgctgcttctcttcttctgttgttttggttctagtgtctctcatgggctagaacttgacaagtagcctaggctggcccatgagcaccagtgatctgccttcctctatctcttgaagtgctgagactagcagtttgggttactgccctttaaaaaattattactaaattttgtgtgttttgcctacatgtatgtctgtataacatgtgcccgtgcaagccggaagaggcagcagatctcctatgaccggagtcatagatggttgtgagctccatgtggatgataggaattgaacttaggtcctctggaagagcaagtactcttaatctctgagccatctctccagcaactccacccccaccccaattaatatcagttttaaggatcaagccaggtcctgattcctgaaaatcaaatacttaccaactaagtcttttgattttgggtgtgtgtgtgtgtgtgtgtgtggtgtgtgtaggggcctgtgcactcacctgtgagtgtgcaagtatagagccagaggtggatatctggtatcgtcttcttttgctctccagttgtggtttttcatacagggcctcactgaacctgcgcctgctattttagctgcagtgccagccgtgagcccctgggacccacctgttttcaccatgcagtgctggggttgcagatgtcagctgcagtgcctggccatgagcccctaggacccacctgttttcaccatgcaatgctggggttacagatgtctgctgcagtgccgggctttgccatggtgctggtgatctgaacccaggtccttacgcttgcacagcagcctctttaccggctgagccttctccccagccctgtccctgagatttttcttttttattttgagacagggtctcattaagctgtctaggctagctttgaacttgcaatcttcctgccttagcctctcaagtagctaggatttcatggctgtgccatccaggcctggcttggcaattattttctagaatggtacagctagatgttactgccactgcatatcattcttttccttgggtggtgaggctgctgagggcccgatccaaggctttgctctgtttgtatcactaagctatacctagagccctgtgtaacactctaacctcatccttataaggagtgagtatttcatatattagtgggcatgttcacatgctagtttatgaatataaataggtacctcaatatttttctgatgatgataatgattggtttttcgagacagagtttctctgtgtagccctggatgtcctagaactcactctgtagaccaggctggccttgaactcaagagacttgccttcctctgcctcctgactgctggaattaaaggtgtgcatcactacaccctgccagattattatttttttgagacagagatctcataatgttggccaggctagttttcaaagggcatccttcctccttctgcctcctaaggagctaagattataggctcacggtcctaactagctcatttactttttttgactattaaagatttaaaaaaacaagttccagccggtcggtggtggcggcacacgcctttaatcctagcacttgagaggcagaggcaggcggatttctgagttcgaggcctgcctggtctacaaagtgagttccaggatagccagggctacatagagaaaccctgtctcaaaaaaaacaaaagcaaaaacaaaaacaaaagttccagatcttgcctggagctgcctcttggtatttctgatccactccaacccctctactcctttgtcagaggaattttcattaaggcaaaaaatttttacaagtacccagtggtctttcccagctgtgcaggtgtctgaattgaactggaacactatgagttagtagccaatatccagcattctgagttagagaagcctgtgcgggcacagcctctctatgggccccattcacgaagcagctcttaagtgagcacttggtctatgtcaggggccacagaactgcaggcagaagaatgcaatgcctacttgagacagaacgattttctggagaggagaggacaaggaggtctggggcacagcacagcctgaagaatttaggaacaagacagcagacacattaggagaggagccagtgaggggatgtcctgggaggcgtttgggacagacctggaggagtggctacctcgcttctcatcattacaggcctgacaggtgtctctcctcttccctcttgccagcctctggagaagggtcttaggaccccagaatcttaagacaagaagcaggtcctccctcaaatgccctgggcctggtttcctgtggaaacggcgaagtggagggagagccagagcagagatggccaagggcctgctgtggggcttgtgccatctgggcctctcagatcccttgctcctggtcctgcccacatagggcagggcctggctgtaggtcctgagtgggtgactgagttgttctatacaggtcttcctatagcaagaatccacctgtttgtccactcaacctctcttttctttataaccttgccctatggaggttatcaggaagacactccttgggtgtggccagtagaaggcacatatttgaaggctttttgtgcaagtcttctctaatcctcatagcaccctccagggaacagtgatcctcctctgacaggtactgacgctggaacttaaagttctttctttgctcaggctaagaccacatagccaggatgcagcaaggagagatctgtcgcatgcacagcggtccagagctgctagggaaatggagagcctgaggggccctggcagggcactgtgatagcctgaggcttctcagagaggcagagcccaggcgctgggtttcagaaaagcatggccctgcctttgaacttggggaggtgtggtaaagcaagtcagatgaagactctgttagctcttcctctctggccagccatccctccagaaggtcataagcacagcattgtatggtctttagcaagctttggttgccagcatgcttattttagttgggcaacaattctgatgttttggagtcagaagtctgtgaactccggttctctgctctggtactctgtcgccttggtccatcattagacctctctggtcccgtttcagcattgtgcatcggaaggttatgaaggtgatgtgttttcccactggggaggcttagcccagaaaaaggtaggggaagacctaacttctcaacacagaatatctgagcaggtggtcctgtgaagggagtaaccattaagcaaccaataagacagatagtgccttgttccatggaaatttgccaggtaaggacagccacattttgagtgttcacaatactctagacatatttcatacattatctcatctagtcacaatatccttgggaggtcgttgttgttattgccccagttttttatgtgaggaaaccaaggtttgtgtgttaagtcttgtgcctggggtaatagctgggttatgcagtagaattgcctgctgcagagtgttcatgggtgttccctggcagtcctcgttgcttatccagttccttctgctgtggctctgtgggtttggggtgctgacttagggctatgcttgggagttctgggtagcctcacacagtcatagtagtccatccttatatcaagatttggagacagttcaggggacacttggtccctctgggactcacttgtaacatggaagctgccacatatattcacacacgctatatccacacacactatattcacacacactatattcacacatgctatttccagactttgaaagctttacagcccagcagggatcctagcactctctgcccctgaacttggcaaacatcctcctcctagactgagcttctctaggcagtctgctccataccagcccctgaggagccaggctgctctgagccctcccaggcatgttaggtcaccttccttgtctggaagttacagtaagcccaggcgtcacattcacctctgcctccttagactcagcacagagctggaactgggggctgcgagttaggtggtgggatccagtcacacactttcatggactagaaaagcaaacgaggcagagggaaatgacttcctcaaagccatgttttataggtatgggttggagttcattcttgaattcttttgatgctggtagaacccacagctttggccacgccaaagctctgtcctcctcttgcctgaactttaaaactctctttaaaatgaaatgtattaatgctgcaatgtgtttacttgtgcatgcatgtgtgtttgtgtgcaggtgcatgtgtgtgcatgtatgtgtatgttccaatcatcttattcagaggccgannnnnnnnnnnnnnnnnnnnnnnnnnnnnnnnnnnnnnnnnnnnnnnnnnnnnnnnnnnnnnnnnnnnnnnnnnnnnnnnnnnnnnnnnnnnnnnnnnnnnnnnnnnnnnnnnnnnnnnnnnnnnnnnnnnnnnnnnnnnnnnnnnnnnnnnnnnnnnnnnnnnnnnnnnnnnnnnnnnnnnnnnnnnnnnnnnnnnnnnnnnnnnnnnnnnnnnnnnnnnnnnnnnnnnnnnnnnnnnnnnnnnnnnnnnnnnnnnnnnnnnnnnnnnnnnnnnnnnnnnnnnnnnnnnnnnnnnnnnnnnnnnnnnnnnnnnnnnnnnnnnnnnnnnnnnnnnnnnnnnnnnnnnnnnnnnnnnnnnnnnnnnnnnnnnnnnnnnnnnnnnnnnnnnnnnnnnnnnnnnnnnnnnnnnnnnnnnnnnnnnnnnnnnnnnnnnnnnnnnnnnnnnnnnnnnnnnnnnnnnnnnnnnnnnnnnnnnnnnnnnnnnnnnnnnnnnnnnnnnnnnnnnnnnnnnnnnnnnnnnnnnnnnnnnnnnnnnnnnnnnnnnnnnnnnnnnnnnnnnnnnnnnnnnnnnnnnnnnnnnnnnnnnnnnnnnnnnnnnnnnnnnnnnnnnnnnnnnnnnnnnnnnnnnnnnnnnnnnnnnnnnnnnnnnnnnnnnnnnnnnnnnnnnnnnnnnnnnnnnnnnnnnnnnnnnnnnnnnnnnnnnnnnnnnnnnnnnnnnnnnnnnnnnnnnnnnnnnnnnnnnnnnnnnnnnnnnnnnnnnnnnnnnnnnnnnnnnnnnnnnnnnnnnnnnnnnnnnnnnnnnnnnnnnnnnnnnnnnnnnnnnnnnnnnnnnnnnnnnnnnnnnnnnnnnnnnnnnnnnnnnnnnnnnnnnnnnnnnnnnnnnnnnnnnnnnnnnnnnnnnnnnnnnnnnnnnnnnnnnnnnnnnnnnnnnnnnnnnnnnnnnnnnnnnnnnnnnnnnnnnnnnnnnnnnnnnnnnnnnnnnnnnnnnnnnnnnnnnnnnnnnnnnnnnnnnnnnnnnnnnnnnnnnnnnnnnnnnnnnnnnnnnnnnnnnnnnnnnnnnnnnnnnnnnnnnnnnnnnnnnnnnnnnnnnnnnnnnnnnnnnnnnnnnnnnnnnnnnnnnnnnnnnnnnnnnnnnnnnnnnnnnnnnnnnnnnnnnnnnnnnnnnnnnnnnnnnnnnnnnnnnnnnnnnnnnnnnnnnnnnnnnnnnnnnnnnnnnnnnnnnnnnnnnnnnnnnnnnnnnnnnnnnnnnnnnnnnnnnnnnnnnnnnnnnnnnnnnnnnnnnnnnnnnnnnnnnnnnnnnnnnnnnnnnnnnnnnnnnnnnnnnnnnnnnnnnnnnnnnnnnnnnnnnnnnnnnnnnnnnnnnnnnnnnnnnnnnnnnnnnnnnnnnnnnnnnnnnnnnnnnnnnnnnnnnnnnnnnnnnnnnnnnnnnnnnnnnnnnnnnnnnnnnnnnnnnnnnnnnnnnnnnnnnnnnnnnnnnnnnnnnnnnnnnnnnnnnnnnnnnnnnnnnnnnnnnnnnnnnnnnnnnnnnnnnnnnnnnnnnnnnnnnnnnnnnnnnnnnnnnnnnnnnnnnnnnnnnnnnnnnnnnnnnnnnnnnnnnnnnnnnnnnnnnnnnnnnnnnnnnnnnnnnnnnnnnnnnnnnnnnnnnnnnnnnnnnnnnnnnnnnnnnnnnnnnnnnnnnnnnnnnnnnnnnnnnnnnnnnnnnnnnnnnnnnnnnnnnnnnnnnnnnnnnnnnnnnnnnnnnnnnnnnnnnnnnnnnnnnnnnnnnnnnnnnnnnnnnnnnnnnnnnnnnnnnnnnnnnnnnnnnnnnnnnnnnnnnnnnnnnnnnnnnnnnnnnnnnnnnnnnnnnnnnnnnnnnnnnnnnnnnnnnnnnnnnnnnnnnnnnnnnnnnnnnnnnnnnnnnnnnnnnnnnnnnnnnnnnnnnnnnnnnnnnnnnnnnnnnnnnnnnnnnnnnnnnnnnnnnnnnnnnnnnnnnnnnnnnnnnnnnnnnnnnnnnnnnnnnnnnnnnnnnnnnnnnnnnnnnnnnnnnnnnnnnnnnnnnnnnnnnnnnnnnnnnnnnnnnnnnnnnnnnnnnnnnnnnnnnnnnnnnnnnnnnnnnnnnnnnnnnnnnnnnnnnnnnnnnnnnnnnnnnnnnnnnnnnnnnnnnnnnnnnnnnnnnnnnnnnnnnnnnnnnnnnnnnnnnnnnnnnnnnnnnnnnnnnnnnnnnnnnnnnnnnnnnnnnnnnnnnnnnnnnnnnnnnnnnnnnnnnnnnnnnnnnnnnnnnnnnnnnnnnnnnnnnnnnnnnnnnnnnnnnnnnnnnnnnnnnnnnnnnnnnnnnnnnnnnnnnnnnnnnnnnnnnnnnnnnnnnnnnnnnnnnnnnnnnnnnnnnnnnnnnnnnnnnnnnnnnnnnnnnnnnnnnnnnnnnnnnnnnnnnnnnnnnnnnnnnnnnnnnnnnnnnnnnnnnnnnnnnnnnnnnnnnnnnnnnnnnnnnnnnnnnnnnnnnnnnnnnnnnnnnnnnnnnnnnnnnnnnnnnnnnnnnnnnnnnnnnnnnnnnnnnnnnnnnnnnnnnnnnnnnnnnnnnnnnnnnnnnnnnnnnnnnnnnnnnnnnnnnnnnnnnnnnnnnnnnnnnnnnnnnnnnnnnnnnnnnnnnnnnnnnnnnnnnnnnnnnnnnnnnnnnnnnnnnnnnnnnnnnnnnnnnnnnnnnnnnnnnnnnnnnnnnnnnnnnnnnnnnnnnnnnnnnnnnnnnnnnnnnnnnnnnnnnnnnnnnnnnnnnnnnnnnnnnnnnnnnnnnnnnnnnnnnnnnnnnnnnnnnnnnnnnnnnnnnnnnnnnnnnnnnnnnnnnnnnnnnnnnnnnnnnnnnnnnnnnnnnnnnnnnnnnnnnnnnnnnnnnnnnnnnnnnnnnnnnnnnnnnnnnnnnnnnnnnnnnnnnnnnnnnnnnnnnnnnnnnnnnnnnnnnnnnnnnnnnnnnnnnnnnnnnnnnnnnnnnnnnnnnnnnnnnnnnnnnnnnnnnnnnnnnnnnnnnnnnnnnnnnnnnnnnnnnnnnnnnnnnnnnnnnnnnnnnnnnnnnnnnnnnnnnnnnnnnnnnnnnnnnnnnnnnnnnnnnnnnnnnnnnnnnnnnnnnnnnnnnnnnnnnnnnnnnnnnnnnnnnnnnnnnnnnnnnnnnnnnnnnnnnnnnnnnnnnnnnnnnnnnnnnnnnnnnnnnnnnnnnnnnnnnnnnnnnnnnnnnnnnnnnnnnnnnnnnnnnnnnnnnnnnnnnnnnnnnnnnnnnnnnnnnnnnnnnnnnnnnnnnnnnnnnnnnnnnnnnnnnnnnnnnnnnnnnnnnnnnnnnnnnnnnnnnnnnnnnnnnnnnnnnnnnnnnnnnnnnnnnnnnnnnnnnnnnnnnnnnnnnnnnnnnnnnnnnnnnnnnnnnnnnnnnnnnnnnnnnnnnnnnnnnnnnnnnnnnnnnnnnnnnnnnnnnnnnnnnnnnnnnnnnnnnnnnnnnnnnnnnnnnnnnnnnnnnnnnnnnnnnnnnnnnnnnnnnnnnnnnnnnnnnnnnnnnnnnnnnnnnnnnnnnnnnnnnnnnnnnnnnnnnnnnnnnnnnnnnnnnnnnnnnnnnnnnnnnnnnnnnnnnnnnnnnnnnnnnnnnnnnnnnnnnnnnnnnnnnnnnnnnnnnnnngaggaggaggaggaggaggaggaggaatgtcctatttatagttgctgtgtcacaatccagagtcacactttacagatggtggtgctcaggcctgtcatagttaaaagcaccggcttctcttttcagaagacctgagttcaatccccagccccagcacgtggcagcttacaaatgtctgttactatagttccaggggactaaactttttttttttcgagacagggtttctcttgtagagccctcgaactcagaaatccgcctgcctctgcctcccaagtgctgggattaaaggcgtgcgccaccacgcccggctgggactaaactcttacacagacacacatacagacaaaacaccaatgcatataaaataaaaataaatcataaaaaaaaacccatgcctttaacttaagcatttaggaggtgggggtatgaaggtctcagagttctagttcatcctggtctacagggctacacaggaaaaccctgtctcaaaaacaaacaaaccaaaccaacaataacaacaacaaaaaaaaacaaatggtggcgtccaatcccttcattaggacacctatttgacaaagtgcagctcatgtgcatagactaggctggttgttctgcagggcccagctctgctctcatggggtagctttgtgctctgtagtttctgtaatccgaagtagtgtgtagggcataggtgtctcttgtacttagtatccccagccaggagcagcctattgtgtgctttcattgtgcccaggcctgtcctcagtgaggaggggggcagtgcttcctctcttggagctgagtgtactcactttctcatggggagagagcagagtgtgtgggtttcctgtgttggacgaatgtcagttctgggagagtattatagactacacaggaaaaaaaccgttatactttgctgtgggggttgggctcttggggcaggatagaacagggacatcgaatctcaccgttttgaataccgatcttgagaactctggctctgtctttgcttcccagacatgtgagctggattaagtcacagccctgctacttaaccagccaggtgaccttggctgagcacttaacctctttgaacctcaattccttccttggctttgttacctggcctaatcatttgaagggctaaataaagtgagatgtgcaacttggctgtcctctcccctagttgggaagctctttgagggtacaactgaataatgagaagatgtctgaaaatagagtcctaccaattcactatctagcccaggctggcccttgaacttggggtgctctttttgccccagcctctcaagtgctggtgttacaaagcagttaaatctcacacacacacacacacacacacacacacacacacacacacacacacacacacaaatgtagctaggtcgtaaggtgtatttgggcatttgattttccatttaatgtgcacctatcttaagctccttgctgaattaactgtctgctcacaagctgctcccagcggatagggagggcatagacacagtgtgcaggagcctggatgatttgcctcaaaaggatacggggctgagctggggggctaacggtcccttggtacaagaggtttctggggagctgagccaggctcatgataagaagtggcccctgttcctctgtctccccccaactctgcgcccctgtgcctgtggccctgacaacccatgtctgtctgcagtgccggatggaatgctgtgacgtgccagctgagacgctctacgatgtcctgcatgacatagaatacagaaagaagtgggacagtaatgtcattgagactttcgacatcgcccgcttgactgtcaacgctgacgtaggatattattcctgtgagcaggcacagaacgagactccaaccccctcaccctccacccctacctctcagcacatctcctctaactctccctccctgtggtcactcctatgctaggctgctcggggacctgcatgctgagaaggaaagctgtgctctccttgggcacgcttacatgctatccctgacacacacaaacacatgcatatgcagttgtgtgccacatgccacataccacagggacacatttttaagcacatgcaatcacagtactgtctatctttcaaatatattcacatacacagacaagtcagagcaatgaggtaagggctgtgtgagtccctgggggcagggtaggcagagagacagtggggacaagggttcttctctgcttcctggtttcacagtgtgtctgtggtaggggttggggggtacctgtcgggatggggagggctggcagttgataggatccctgtatttttggcctccatcacacccttccttataggaagatgggccagcagcctggctgaattattccttgccctctacagggaggtgtcccaagcccctgaagaaccgtgatgtcatcaccctccgctcctggctccccatgggcgctgattacatcattatgaactactcagtgaaacaccctgtgagttggcctgccctcccctggggtgtgcagaagggtgatgggcagggctgggctgtggctggctgtccagtgacttcgggcaggcatgggggctggtttccttcctgcacattgaggataatgacttcccttcggggcctgtccagtagctcagggaaagggcagtatgggccggctctgccgtgagtgggtgggatgacctgatgtgggtggaccagcccttgggatgagtgaggctggcctataaatgggctagcaggaactagaaggcaggttcctgtggtgggactcacttgaactccctgggcagagagggcaggcaggtgtagttagcctaggcaagggttcagtgcccacaaacacgcataagccctgacatagcctggcacttccctaatggcacagagaaagcacaagtgagagggggcaaggatggcctggcctgattatttttccttaacctacattaggtctggacgggcacagttgtcaagaaatgtgaacagctatgggttcgtgtgtgtgtgtgtgtgtgtgtgtgtgtgtgtgtgtgtaccttatagaggcagtccctctgaccccacccaagtctcacctccctgtgccttccatccccagaaatacccacctcggaaagacttggtccgagctgtgtccatccagacgggctacctcatccagagcacggggcccaagagctgcgtcatcacctacctggcccaagtggaccccaaaggtgagggcttggccctgcagtccatcagcaggggctccttccctgtacagggaatgaactggatctgccaggctatctgaaggccgtctgttaggagctgtttagtactgggggatctctagccaaagctagtggtttgaaagcaatggacccacgaggcggccagtgctcctctcgggagtttggaactgccttcctggtgctagcattcctagcctggacctgctctcaccaccgcatctccttcggccacatcccagaggcctgagctttccaagctgttctttcagctcacgtctgcgacagatgagccctcatctctgttgaggtggttatcctcctagacatcttcctcaggatgtcttctggacacctgagacttgttgtacccaaccgtgaactcaccattgcccttcttagacccacccttcatcagatcagtagcttgctttctggtcccctttgtttagaacttgctagttaattggggccagcttctccttgtcagctcctaaatgtagcacttagtctctctcttcctccctccctttcttctgactcacccaggctggtcttgaactcgccatcatcctgactttgtctcccgcatgctgggaattccaggcccgtgttaacatacttagcccctgttctcaccttttcaccctctgacagctcccagcctatcattcttctggtactcagccactttgtttgtccaaacaagctactagaggagataaaaacaacacttacttcctctgactcacctgcttaaaatgtcactgtgactctgttgccctctgagtccagccagagcccctgcccagggcggggaagggggatctctagccccctcatgcccttccacttcttacctccatgtccctccagcctttatcctcagctagctccctgaacctctgcttcttactcagtgctcccggagtccctgactcccagagtgagagcctgctgcctgtttcagggcccatccccctccagcagaacaccagtctgtgttgaaatgtcacacactgaattcctgttgtgagtgtccagacaggtgcagggtgggtgtcacagaatgtggagtgagttggtgactgaacacgtaaagacaggattgtcattgacagggataccccgcagcctaggtcagggttccctgctctttatgagtgttctgtgtgtacagagcaggaacttggagggagacaggtggagagctggcctatggattccagggcgggctagactagagtgctgagcctaagatgtcttaggaggctcagcaggacagacaggagagaggctgagcctcagggacagacctaggctattagtgtgaggagaaggaggtgacaggctggagcttggtaggtcagaatgtcacaccacaggtcacttgtggttacctagggccgtgtggttttcttctctgaactggagctcagcagacagacagtggggccagagatgagcttgggggatctgagaaggaatgccaagggggtggcctccccacaaactctgaagagggaggggggctggcagtgggtggggctgggtgcctaagggcttctccctgcccccacaggctccttacccaagtgggtggtgaataagtcatctcagttcctggcccccaaggtaagtggctgtgtgctctgggacatgggggagggggtagcactgaggagtagggcaggggcagagtcaacactgggtgatggctgatgaaccaggtctacccatggccgtagttgggacactactctgcaaggaccaagaccagactggggtggaaccctggggactactgtacaccgcaggagggctctggaggggtgtggccctccaggcacccctaacaatgttcgaatggtctacaggccatgaagaagatgtacaaggcctgcatcaagtaccccgagtggaagcagaaacaccagcctcatttcaagccatggctgcacccggagcagagcccattgcccagcctggcgctgtcagagttgtcggtgcaacatgcagactcactggagaacatcgatgagagtgcagtgacagagagccgcgaggagcgggcaggcggtgcgggaggagagggcagcgacgatgacacctcgctcacctgagtgaccggctctctgcaaggaccaagaccagactggggtggaaccctggggcactgagccttctgcacttcctcccttcccccacctgccttctgggggggcactgggctcctgcccaggtggctgcggcatggctggacatggccccaataaatgaaccacacagccccagccagctctttgtgcctgcttctcatctgctcagccccacgctgctctgttctacagttattttccttaatactcttattgttcacaggactgctgtccctataggcgtcttgtaacgtagggtggagcttgttgccccctcctttcctgtggttcctttcttttcgttcatttgcacattcatttttctggtcacaaaggtggtttgctcattttttcagggctcttaagaggagctggtctaacctgaggtcaggcttctactgtgtgatggacttctggtccaagctagctttaaacagttgatctggcatactctgactggctcctgtcatcacagaaagaaggggagggactcacaggtcaaagactagggctgaaggcctcagannnnnnnnnnnnnnnnnnnnnnnnnnnnnnnnnnnnnnnnnnnnnnnnnnnnnnnnnnnnnnnnnnnnnnnnnnnnnnnnnnnnnnnnnnnnnnnnnnnnnnnnnnnnnnnnnnnnnnnnnnnnnnnnnnnnnnnnnnnnnnnnnnnnnnnnnnnnnnnnnnnnnnnnnnnnnnnnnnnnnnnnnnnnnnnnnnnnnnnnnnnnnnnnnnnnnnnnnnnnnnnnnnnnnnnnnnnnnnnnnnnnnnnnnnnnnnnnnnnnnnnnnnnnnnnnnacacttccactgcacttagtgttaaagaccttaggctggtcacaggaatcgtgaggtcccctgaccaagtgtcaaccctcacttatgcctagctgctctgagatctagagggaagcctgggctgcctctgctgtccaagggatgccgagtcccagagttagtcttaggccctgcttttctctggtatttttggcaccacaagaacttggggtctggaaagaactcaagatcttaccctattcacctctcctggaaagccctgccagtggaaaaccttactgggctaacagtcaagtgtttcccagagaacagtttctgaggagaggcctgtcacctggaacatccagccctaggtctgcccataatggccagtagctttgagaacaccctgagaatgtcagactctcatttcctaacctataacctagggtgataatttttacccttatgcaagtgtgagtttttttttttttaaattaatcagaacaaattgttcatcactggaccaggcatgtaataggctctgattaaagggcatcttcctcctttcagggcaaaagccccttgacccaccctgctgatgactgttcttccaaatatgcccactgttcctatggaaaaatggaagcccagctaaattaaggcccctggtttggctggtcccagaggctagcctcaggatccagaaatacctgccaagtctagggatttcatctctctggggaggaggtgagaagctgccagactctggtgggcctttcccagcaccttctgcagggagatgcagtcctggggacagaagcagagtactaagaatggtgcacaggactcccagggaaggtggttgtcccgcctccaatggttgtgtgtgtgtcctctcccagagggtagactcaccagaacaggggtgtcgaggcaaggagactcaaggatccgtggagtctcagcagggacaggatagactagacatgagcctcaaagccttagcaagctaaggataaaggagagacacaaacccggcggtccggtctgcctagggtattgaagatccggactaggctgggggcgggaccggccggctccctgcccgttccccgccctcacgtcccccggtgtcacgtggggcgggcggaagcgccgagcgaggtgggcgcgcccggaccgctgccgcgagttggctgcggccgcgtgtgacagacggtaccgggaccccgagtcccacctcgtggagttctcttcgctcaaaacaggtcagtgaggttgctgggacctcccaatcgccagttgtggcttgcactgcccccattcctcagaagggaatggtgagccccccacccccacccgctcaattttcccggggtcatctggtgcgcgctcttgcctggggatgaagtgaagtggggtcgcctctggaggtgaagtcatctagccagactcgtagggacagagaaagtgagctggtggacaccagctttcagccgtcagctcttctgctttagggcttgcaggctccggagccagtagcgtcaggcagcttggctttcccacttgagaaatgaagacttctacctagtctaccccggacattcttacagcctcgcaaagctttaggactttagccgtggacctgaggctttggtacagcctcgcaaagctttaggactttagccctggacctgaggtgttggtaaccttgggcaagctacttccgtcctccgcacctcaattccccaccagttaatgggggcatggtttctctagagcttacctggcccagttgccaggaaagaaggggtgtgttcgttgaatggggtcaggctgggaatgggtggatgggcttagagcaggtttgcagtgcagcgggggatgggggcttttggggaggaggcgggtaggtgtttggacacagatctccgtgggtagatttgggtgctgggtgattaggagccaggttgtctgacttatgtttctctaaattcagtgtcttagggaaagcttccctaatgcctagactgggggttcgggattcagggttagacttggggatgctcaggtaaggatttgactactgttgggtccaggggaccctgataacctgtacttggaaagttgtgactgtcctgctaagggaagcctaggctcctagcagcgtcattatagggtagaagaaattcagcagaacccagagacaggcgtggacaggtgcagacctggggaggagaggatgcctggatgagccttggtagttaagtggctgtttgctaagactggctgcaaggtgagggcagagcttgtgccgcacagcagggatactgataaccttccggaggagaggcaagggatgtgggtgtggctgtaaggggtggcaagggaggatgtgcagagaacccatccttgggatttatacctggctaaagtttatttagaccccggcctggggaccctgctccccagtgaccgtttgctcactggaatagggtacaagtgagatgtcccaggcaggctactgctggctgtgaggaggtgatggccccgacgccccaggtttcatttggacgttcaggcctccttatttggtccccaccatgcagaggagagtcagtttctgggcaaaggtgttccccaccaagtttcctcctcatccaagtccccgtgttctgtgagacttcagggttcagatgtgggctgcaagttgcagtgccttccagcctggttgtcagttccgggtaatggcaaggctcagggcaggtttctatggacgtctatgaagatggggtatgggcatctggagttctagcactgctaccaagccctgtctgactttgccacactccgtccttttcagagtcccctttccacatccgagggtgggatgattagcctgccattgtgttccaaggacagaccaagagtcaggccagtgtgaatcctgcccagagtcagagtgaaggaaaggggagccggagagcctagcactggctagtggtgatccaggcctaggacctctgtctctaatattctctagggcttctccctccccactccactctcttggctgagctcaaagccagccgccaatgcccaaacaagtggcctctgttcctaggggagggggaggggaggcaggccctgggctctgggcctgcctgtccagcactgaccctgcctcccccttttgctgtgggtcttaactcttggaagcctgaactgggtactggactgtttgagggctggtacctcttgtcctacagctgccctgtccaccttgcttcagatctctgggctctcactctttcagaggggactgataggatgtccttctcagaggagcatgtacatggtatatggatgacagtcagcctctctcaactcctttcaagtccatcaggccagacttagtccctccacagacagcacgaggatgttgtgttttagagaaaggttctgtgctcagaatgacaacccgatgtctgatagtaaagatagaaagttcccttcaatgcatagttttcacagagctcacattttacaccaggacccctcccgccagttctgacagagtacatagcttcatgtccacctatccctcccccaagccagaccccccagacctgtccattccaactggggctccctggggacagcagtccctgcccaaggaagcaaatgtcccctaaatgacagaaatcaggagtggtgaggggccacagctcagggctcagtgcccacagctttcctgtggaatatctccctgcccctctcattttttgggttacagatcagaaagaaaagcctgttctataagatttctgagtcaggtgtggtggcctgtgcctttcatcctaacactcaggcagcagaggcaggtagatctctgagttcaaggccagcttgacctatagagtgaatttaagaaaggccaggattacacggagaaatcttgtctagaaaagctaagaaagtggaaaaaaaaagttcagccctagatcactgggaaagagtgactgggagagacgtggagttaagtgacaacttcgataacaatattttgttcagtataataagtactatctgagtatagtcaaaacagcaatagaagctgctctttcttggccattcccattttataggtgaacaaagtgaggccaagaggcaaagtgattttctaggaaccagacatttcttttcttttctttctttctttctttctttttttttttttttttttgttgttgttgttgttttcgagacagggtttctctgtatagccctggctgtcctggaactcactctgtagaccaggctgtcctcgaactcagaaatctgcctgcctctgcctcccaagtgctgggactaaaggtgtgcgccaccactgcccagtgggaccagacatttcttagactcgtggggacgcttttttgcatttttgttaattagagtgagacccttgagcacagggagagattttacaggttcaaactcggcccttccctagatactccccattgcagtaactggcatattggaggactgcttaacattggtggtgatcaatttggggcaaagattaattttttccctgtcccctggatttcccagaccctattttactgctgaggaagccagggtctgtaaacagtcagcgtcttggagacaaaagcggggacaggagtccaggctgcgggtgtacctgtgctctcctccctgcctggggtcaggggcttctctgaaaccctgagctccttcctaaggctgcccgttgccttctcacagtgctcaggtctgtgtccttaataaaccaggagctagctcttcttaggggccctggtattgctgccatggtattggtaggtattggtgactgaacaaacctgggaaggttcccagagtcaagagaccaaggcgccaaggccgcctgaggtcaagtacattgtgcttagggctccagtgggccagggagggtgtgggatgtattcccccccccccaatctaatcttcttttacctcattttgttttgtgaagacctctcagggccattcctccgtcatcatctgagggtagagagccggagtttctggaatcttagtggcccaggaccccaccggagtcttgtctggccagaccaggctgcagtaggtggctgcatacccaggacaggacactttaaggctgaaatgttcttgttctgtagcctcctaggagccagggtctcccccactggcatccatctctccagacatatttttcctcctcttcctaggtctacctgtcccatatgtggacagcaccagagagaaaccaatgggacagtctcgggctcgatcagtggtagtggctggaagagaggcatcgctcatcatcactctgtcccttgacccacattagcaaactctatgattctgaatctgccacgcaaagtgttaagagacttgagcagtgtggtttatgcaggcgtttccagcttttaaattttaaagtcccagggggcctacaaagcttggatttggagtgggtctccttgaattgaagctaaaccttgtgccacccttggccacgttgtcatcagactgcagcttactgttgtgggttactcggtggctttggttcccttctggcctccaggctcatgcgaccacatatgctctgctctgctgcttctctttctagaaatccacagggccagccctgtggcccaggggtagcacgtggcacagtagtcttatagtggagaacctcaggggtaggaccattgactgcattcacaaaagagaagccctgtggataggagggtgcagtagaggaggaagccagcctaagggctggcagggtcatagaacaaggtcaaggattgctctgtggacatcaaaaatagcatgagatgtggcacagcagacccagatcaagtctgtaaaggatcggggtcaggctggaggaccctacagagaggggtggtgggcagaggcttgagtcaaggacctttggatgcaggaagctggaccttggccagtgcctttagggttttttgtttaaccacatcagctatgtagaaggagacctgttccttacactatgtgtgatgcttcccagaaggctccctggctgggaggctccttgatacgggttggggtacatctgccagtcctttcctatgccattccgtggatagttcctgtcattggattcagcatttaatgtcccaggacttggggcaggtggagccctctctgtacccatggtgtgtgagcttggctcaaacccctgagtgtcagctctcaggctccttattgaggaccttcagtgggctgtgtgtagttttgtaactaagatgcaatgatccccaagaccccagacctgaccgggaaaaaggggaacccactccctgaagggcagaacctggtacagatattttcccagagggcaggtccctcttgcttggggaagaggtgccagagtattagctaattagcccatcagcatgggctgtgtgtgcctccaacacctgctaactcttcctctgccctaaagatgactcagctgggcgtggtggcgcacgcctttaatcctagcacttaggcagaggcaggcagatttctgagttcaaggccagcctggtctaccgagtgagttccaggacagacagggctatacagagaaaccctgtcttgaaaaaccaataaataaataaatatataaagatgacttactcagcctagggagtctgaacatccagggacctgaccaggacacttcctgtggcctgaaaacccacattttcaggtctggagagatggctcagtgacttagagcacaggctgcttttccagaagattcaggtccaatttccagcactcaaatggcagctcacaactgtctctaacagttccaggggatctaatgccttcttccagccaccgagggcactaggcacacacacataaagagacatacatacaagcaaaacatctgtaatatagaataaaatggaagtgtaaaacccacattttgggctagggttgatccagcacccactaggttcaatctccaggatatcaaaaactgggtatgacagtatttctgtaatcccagcacttgggagatggaggcaggagattcagaagtttaaggctgggatgaggagatggatcaggggataaaacacttgccatgcaagtgaagggaccagatgtaccaccagaacctatgacagaagttcaatcatctgtaattcctgcactcccacggaaagatgggaggcagagatggaggactccagaagctgggggccggctagcctggtctgtgcagcagagagcaaccagagaccctttctcaagcaagatgaagatgaagacccacatcaaaggtggccctggttaagctcttgctctctctgagactcacctctcttctggaaatgggaagagtttggtgaggcactgctcggtgtgttaggagagagtggttagggctccggtagtgctggtaagtcagggcaggaggtagaattgtatcaggtgcagtagaataaaaagtccccatgcccggaaagccgctcgctgacctgcagttcctgcttcatgtgtcaaccaggaaatgcccacccagttatcagctgtttactatgtgctacctttgagacacaggggaatcagaccctggccttgtctgggtcgggttgagaggaagcacgtgatccaactgtgacctgggagtcagagactgtcctttggagcaggctggaaaggctgggtggtgaagaaataatgcaggcagaggggattgtgcaagcccaggcctggaagaatgcatgggtgtgaaagaaatggggccagtgtctgagctccctggacactgaacagtagtggagggtaggcaggcaggggagagacatgtgtgctgtgctgtgagatgagtggctgggctcagattcctgggagccaggtgtcagctgctccagagacctgtgcgccagcatttctcctctgtgtggactccccagaagtttatattgagctacccagctggaagtggctgggccagcctcacttgggaagacagctacagaggattccaggggaccccggaaccttatgtctgagagattcctagacttctgccttgaacttcacaggtgccttgcccaactctgctgtctcaccgggtgactgctgtgctcattgtagccatctgtagatcctgtcctgcccacgctgacccactgctggctgtgtgtggtgtgtctgcattctggaggctgagggaaggtggttgttgtcagttctggaccagcccaggataaacaacaaacactggaacaataacaaaacaacaccccccaaaccacccccaaaaactcctccctttgtgccccctacaaagaaagacaatgaaaaaaattcatagtcgggcgtggtggcgcacgcctttaatcccagcactcgggaggcagagacaggcggatttctgagtttgaggccagcctggtctacagagtgagttccaggacagccagggctataaagagaaaccctgtctcaaaaaaaataaattaattaatttaaaaaaaaaggatttctgagttcgaggccagcctggtctacaaagtgagtgccaggacagccagggctacacagagaaaccctgtctcgaaaaacaacaacaacaacaacaacaacaaaaaaaaaaaaagaaagaaagaaagaaagaaagaaagaaagaaagaaagaaaaaattcatagcccagaaagcaagaacacaatgtcagtgtagctgaggactccctggggggctagagcggaagctcgagggtaaagggccttggtgtgctttcatgcagacctgagttcagatctccaacacccaggtaaggagctgggcacatctgtaaccccagcactgggaggacagagacgagcgccctcccgacctcagtgcattcaggctagtgaaactggtgagcttcaggttcaatgagagatcctggctcaaaaactaaggtggaggatgattgagaaagatacctggcataactccctagcctctgcatgcatatacacacacacagacacatacacacacacacacacacacacacacacacacacacaccaaaaaaggaaaacacaagtgaatcttcaagtcttgcagcattaggagcccctctgtctctgagtgttctgtgtcccttctggctggctgtcaccattgtctgaacagtatggatgagtgtcttatttaaaaattaattaatttttcgagacagggtttctctgtgtagaattcctggctgtcctggaacacactctgtagaccaggctgtcctgggactcagatccgcctg

SEQ ID NO: 524 - DNA, 1277 bp, Mus musculus
catccttagcggcagacagggctaccccaggaggaaggtggggaaaaggggcccgtgggggtaatttatcatccaaagacctccgtccatctgtctgtctgtctagatggcaggtcccaggaaggtggcgtcagcatctgcagccgcgtcgacgttgtctgagcctccgcggaggacccaggagagtcggactaggaccagggccccgggcctccccacgctccctatggaaaagccagctgcctcaacagaaccccaagggtctcggcccgccttgggccgtgaaagtgtccaggtgcccgatgaccaggacttccgcagtttccggtcagagtgtgaggccgaggtgggctggaacctgacctacagcaaggccggcgtgtctgtgtgggtgcaggctgtggagatggatcgaactctgcacaagatcaagtgccggatggaatgctgtgacgtgccagctgagacgctctacgatgtcctgcatgacatagaatacagaaagaagtgggacagtaatgtcattgagactttcgacatcgcccgcttgactgtcaacgctgacgtaggatattattcctggaggtgtcccaagcccctgaagaaccgtgatgtcatcaccctccgctcctggctccccatgggcgctgattacatcattatgaactactcagtgaaacaccctaaatacccacctcggaaagacttggtccgagctgtgtccatccagacgggctacctcatccagagcacggggcccaagagctgcgtcatcacctacctggcccaagtggaccccaaaggctccttacccaagtgggtggtgaataagtcatctcagttcctggcccccaaggccatgaagaagatgtacaaggcctgcatcaagtaccccgagtggaagcagaaacaccagcctcatttcaagccatggctgcacccggagcagagcccattgcccagcctggcgctgtcagagttgtcggtgcaacatgcagactcactggagaacatcgatgagagtgcagtgacagagagccgcgaggagcgggcaggcggtgcgggaggagagggcagcgacgatgacacctcgctcacctgagtgaccggctctctgcaaggaccaagaccagactggggtggaaccctggggcactgagccttctgcacttcctcccttcccccacctgccttctgggggggcactgggctcctgcccaggtggctgcggcatggctggacatggccccaataaatgaaccacacagccccagcca

SEQ ID NO: 525 - protein, 331 aa, Mus musculus
MAGPRKVASASAAASTLSEPPRRTQESRTRTRAPGLPTLPMEKPAASTEPQGSRPALGRESVQVPDDQDFRSFRSECEAEVGWNLTYSKAGVSVWVQAVEMDRTLHKIKCRMECCDVPAETLYDVLHDIEYRKKWDSNVIETFDIARLTVNADVGYYSWRCPKPLKNRDVITLRSWLPMGADYIIMNYSVKHPKYPPRKDLVRAVSIQTGYLIQSTGPKSCVITYLAQVDPKGSLPKWVVNKSSQFLAPKAMKKMYKACIKYPEWKQKHQPHFKPWLHPEQSPLPSLALSELSVQHADSLENIDESAVTESREERAGGAGGEGSDDDTSLT

SEQ ID NO: 526 - DNA, 58922 bp, Homo sapiens
  misc_feature (1)...(58922): n = A,T,C or G
taagacagaatccaatgcaattcaaagaaggagctggatctatgtgtcctgacattgtaagtatatgtctgaaatacttcataatacttcttaaaacccgacaggtttatttttgtttttaaaggtatattttgttttcttgtttttttttttttttttgagatggagtcacgctctgttgcccaggctggctgaagtgctgtgacacgatctcagctcactgcaacctctgcctcccaggttcaagcgattctcctgcctcagcctcccgagaagctgggattacaggcacgcaccaccatgcccagctaatttttgtatttttagtagagacggggattcaccatgttggccaggatggtctcgatctcctgaccttgtgatccggccgcctcggcctcccaaagtgctgggattacaggcgtgagccaccgtgccaggccttctttttcttttttaattgagacagggtctctgtctgtcacccaggatcgagtgcagtggtgtggtcatagctcactgtagccgtgacctcctggactctagtgatcctcctgcctcaatctcccaagtggctggtcctgcaggggcatgccatcacaccaagctttttatttatttatttatttatttatttatttatttatttagagatagggccttgcgctgttgcccaggctggagtgcagtagcgtgatctctgctcactgcaacctccacccccaggctcaagcaatcctcccatttcagcctcccgtgtagctaggaccacaagcatgtgccaccacaccttgctaagttttgttttttgtttgtttgtttgttttgtagagaaaggtttttgccatgttgtccagattggtctcaaattcctggactcaagcaatttgcccaccttggcctctcaaaccgctgggattgcacgcatgaaccacctcaaccagccatattctgtttctattataaatgatgagattaagcgttcagactgctgtttgcaaacagttttcacaaatgacacctttaggggcaggttggctttcttctcagtatatgaaaaaccaaatgagatatgatcatcatgtctacttttttttccttccagccgtggttttgcagccttagtgacatctggatatgagtttggagcagataaatgcaagaatctggtaacaatcagcttgaggcaaatttgcaggtttatttttatgcttctttttaattagttatttatatccataaccaatagcccactaaatatgataaactaatatattaatagaattaaaaactaaacaggtcaggtgtggtggcttacgcctgtaatcccaacactttgggaggccaaggcaggaggatcacttgagcccaggagttcgagacaagtctgggcaacatggcaaaaccccatctctactaaaggtaaaaaataaactaaacagtttaaaagtctgaaatggttaaaaacatccattgtatggggaaagtgggttcagctgtagctgtgttagtcttttgttttttgttttttttttttttgagatggagtctctctctgtcgcccaggctggagtgcagtggcgcgatctcggctcactgcaagctctgcctcccgggttcacaccattctccttcctcagcctcccgaatagctgggactacaggcgcccgccaccacacccggctaattttttgtatttttagtagagacggggtttcactgtgttagccaggatggtctcgatctcctgactttgtgatccacctgcctcccaaagtgctggtattataggtgtgagccaccgtgcccggctgctgtcttagtcttttggggctactataataaaacaccctagagtgggtcatttataaacaagagaaatttattgctcacatttctggaggctgggaagtccaagatcaagacaccaacagattcagtgtctggtgagggctgctgtctgcttcaaagacagtgctttctctctctattcccacatggtagaagaggcctgggaagctctcttgagcctcttttataagggcaccaattccattcatgagggtggagccctcatgatttaatcattcccccaaagccccacgtctgaatactatcacattgggtatcaggttccaatgtatggattttggggtgataccaacattcagaccatagcagttgctaatggggtctcagcactccctgaccttgtgtgcataccacatgcactcactattcactattattttatgaaagttgccagaatcaaaatggagtcacttggcccagagcggtgggtcacacctataatcccagcactttgggaggttgaggtgggcggatcacttgagcccaggaggaggctaagcctgcagtaagccctgatcacgccactgcactccagcctgggcaacagaggcaaaccctgtctcaaaaaaaacaaaaaacgccaggcgcggtgggtcacatctgtaatcccagcactttgggaggctgaggcaggtggatcatgaggtcaggagatctagactatcctggctaacacggtgaaaccccatctctactaaaaatacaaaaagaaaattcaccgggcgtggtggcgggtgcctgtagtcccagctactcgggaggctgaagcaggagaatggtgtgaacccaggaggcagagcttgcagtgagccgagatcgtgccactgcactccagcctgggcgacagagcaagactccatctcaaaaaaaaaaaaaaaaaaaggagtaacagcaataacaaaacagagtcactagtatttaaaaaaaaaacaaggctgggtgtggtggctcatacttgcaatcccagcacttcaggaggctgaggtgggaggattgcttgagcccaggagttcaagaccagcctgggcaacatggcaagaccctgtctctacaaaaaattataaaattacccaggcatggtggtgcacacctgtaatcccagctgctcaggaggctaagggggaggatcacttgagcccaggcagtagaggttacagtgagccgagatcgtgccactgcactccagcctgggcgacagagtgagaccctatctccaaaaaaaaaaattaatcaattaattttaataatttattttagcacaaattacctagaacttagcagcttaattaattaattaacttaaaaaaaaaaaccctgacagtacggtcagggaaggatatgaagagagaattgttatgcttatatgcctcctaagaaaaataatcacaggccaggcatggtggctcacgcctgtaatttcagcactttgggagtctgaggcaggtggattacttgaggtcaggagttcaagattagcctggccaaaatggtgaaaccccgtctctactaaaaatacaaaaaaaaaaaaaattagccaggtgtagtgccacacacctgtagtcccagctacttgggaggctgaggcaggagaatcacttgaacccaagtgagccaagatcgtgccatcacactccagcctgggtgacaagagtgaaactccatctcaaaaaaaaaaagagaaaaagaaaaacaatcacaggtcgggcacagtggctcacacatgttatcccagcactttgggaggccaaggcaggaggatcacttgaggtcaggagttcgaaaccagcctggccaacatggcgaaaccctgtctccaccaaaaatacaaaaattagccaggcacggtcgcacacgcctgtaataccagctactcgggaggctgatgcaggagaatcgcttgaacccaggaggtggaggttgcagtgagccgagattacaccactgtactccagcctgggcgacagagccagactctgtctcaaaaaaaaaaaaaaaaagaaaagaaaagaaaaacaatcacaaacgactataaaaaccacaacctgcaaccttccacacaaaaaaagaaaaaattaattaattaaaaaaaataaaaatacttctgtgagggaatctgcccagcaactgcctggctaaccccagactggtgtcacctgatctctgtagccaagcataatgatttcaaaacaattatataatcctcctcattttttccctttgaaaacatttgtcttcatttacctccctgaatacacactggtttctatagcatgtgtattcccattgcgatgttctattcccaaataaacgtcattttcttttaaagagcctctctgttatttaggttgacaccttaaagggaaaacagtgtttgggatggagtgaactgaaattatacctttcctccccccaagggaagaatcaagcatcattcaatattggctaatgtggaaaatgcttcgaaatgggcaagagatgccaggcgcaatggctcatgcctgtaatcccagcactttgggaggccaaggcaggtggatcatttgaggtcaggagttcaagaccagccgggccaacatggtgacaccccatctctactaaaaatacaaaaaattagccaggcatggcggtgtgcatgcctgtagtcccagctactcatgaggctgaggcaggagaatcacttgtacctgggaggcaggggttgcaatgagctgagattgtgccactgcactctgcatgggtgacagagcgaaactccatctcagaaaaaaaaaaaaaaaaggcaagagagaggaagatgaccccatattattttaaaagaagccaggtcaaagtcatgtgaataaaaggaatacaaatttgtttggtatgagacgtggcagaggtggattgggatgaagtggcaagaggatcccctcacaaagaagttagaccctctatggaagtgtgtttggtttcaagaagtgttagaaggaaaaccaggcacagccacagggaagcttcctgtcacagtactccccctcccagcagcagataggccacaggctgcccctctgcagagatctcagctgaccccaggagaaagccaccaggatcagagaagagaggtggctgtgaaattcccaagacacaagaagggatcaagactggagggggtggggaaactgactagaaagtcttcaaggtaggagaccatgagagctcagatcaggagaaggggtagaaaggcgggacctcctctgcagcctccaccttgaggcccaaccccttgtcaagagacagggatgagggggtggagcaaatcgggcccagtttctaccttcccccaccttgaaatcctcccagctttctaaggttttaggatattgatctatgtgaaaaacagccgattcaatgtgacgcagtttgtgggcagtgggtaaagagggacctggcccagtgaggagtagctgccctccaaccaaagagtcagaaaaaaaaaaaaaaagtcagttttgaacacacctagtttaaggaacttgtgagtcgaccagagggagatgtcctagaggcaggaagaaggcctgagctggaggtttgggggctataagcatatggatggaagtgaatgaggtcatcccaaaaaagtgtgcagagtaaagagagggtctgtggcagacctggaggacaccagtatttcaggctgtcctagcccaatcagccaagaccaccaaggaacaaacccatggtttgatgaagtcaggtttcttgtccccttgtaatgagacagacagcacactggagaaaccaaggagtgtcccactaagcacaaaggaagatagttttacagggtttgggagggggtggagatgaggtgaaatttaaatgaagcaatattttgataggctcaaagcaaagcagaactgtgtataaaggggctggcatcagttctggactgccacaggacctacagtcctgtttctttggaaaaaataagatagatgtagaatattgtgttcaaaacttccttacctggatctctgtacctgcattataaaccctgtctatttagtgacttagatcttccaagcaagtgtttttctttttctttttcttttttttttttttttttgagctggagtttcactctgtcaccaaggctggagtacagtggcatgatctcagctcactgcaacctctgtctcccgggttcaagcagttctcctgcctcagcctcgagtagctgggactataggcacgtgtcaccatgcccagctaatttttgtatttttagtagagacagggtttcgctatgttggccaggctggtctcgaactcctgacctcgagtgacctgcccatctcagcctccccaaagtgctgggattacaggcatgagccacagcacccggcctcattcttattcatataatttttaaaaaattgtttttttttttgagacagagtctcactctgttgcccaggccagagtgcagagtgcagtggcacaatctcggctcactgcaacctccacctcccaggctcaagcgattctcctgcctcagcctcctaagtagctgggattacaggtgtgcaccaccatgcctgactaatttttgtatttttggtagagacaagttttcgccatgttggccaggctggtctcgaactcctggcctcgagtgatccccatgccttggcctctgaaagtgttgggattacaagcgtgagccactgcacccggcctattaatacaattttgtaaaccaaaaagtacctgagacaggtctctatcagtttagagatttattttaccatggttgaggacaaacctgggaaagagacaacagccacagtagaatctgtggcccatactttttttccaaagaggagtttgagaccaggtggggtggttcacgcctgtaatcacagcactttgggaggcaaggcaggaggataccttgaactcaagagttttgagaccagcctgggccaacatggcataacactgtctataccaacatcactataaactagtctgggcgcggtggctcacacctgcaattccagcactttgggaggccaaggcagggggatcactctgaggtcaggagtttgagaccagcctgccacccatggtgaaaccccatctctactaaaaatacaaaaattaggccaggcatgatggctcacgcctgtaatcccagcactttgggaggccgaggtgggtggatcatgagatcgggagttcgtgaccagcctgaccaacagcgtgaaacctcgtctctaaaaaaatacaaaaaaaaaaattgctgggcatggtggtgagcacctgtaatcccagctactcaggaggctgaggcgggagaatctcttgaacccaggaggcagaggttgcagtgagccaagatcacgacactgcactccagcctgagcgacagagcaagactccttctcaaaaaaaaaaaaaaaattagctgggcgtgttggtgtgcgcctgtaatctcagctacttgggaggctgaagtagaagaatcccttgaacctggcaggcggaggttgcagtgagccaagatcgttgcagtgagccactgcactccagccagggtgaccagaataagactcccatctaaaaaaaaaaaaaaaaaaggcaaaacataattaaagtgagaattaaaaaaaaattagccaggtgtagtggtgtgtgcctataaacacagctactcaggaggttgaggtgggagaatagattgagcccaggaggtccaggctgcagtgaacaatggtcttgcctccagcctgggtgacagaatgagaccctgtctcaaaaaaacaaaaacaaggccgggcacagtggctcacacctgtaatcccagcactttgggaggccgaggtgggcggatcacacggtcaggagatcgagaccatcctggctaacacggtgaaaccccatctctactaaaaaaatacaaaaaaaaaaattagcccggcgtggtggcgggtgcctgtagacccagctactcaggaggctgaggcaggagaatggcatgaacccgggaggcggagctggcagtgagcccagatcatgccactgcactccagcctagatgacagagcaagtctccgtctcaaaaaaaaaaaaaaaaaacaaaaaaaaaaccacaaacgaacagcccctgccctccccccaaaaaagacaaactgcatctcacacacaggtgacccctgtgaatacagtctctgaggagtgatggaagaggaagccctgtgagaggtgcagactgctaccctctagaacaccaggatgcctaaatagtagagggcagtttcattagcgacatcagtttgcaaactgaaaagagacactctcctgtaggtaccaaaggtgctctctctttgtatagggaaaaggcaggctggttgttttttgtttttgttttttgagacggagtctcgctcagtcgcccaggctggaatgcagtggtgcgatctcggctcactgcaacctccacctcccaggttcatgccattctcctgcctcagcctcccgagtagctgggactacaggcgcccgccaccacacccagctaatttttttgtatttttagtagagacggggtttcaccatgttagccaggatggtctcaatcttctgacctcgtgatccgcccgtcttggcctcccaaagtgctgggattacaggcgtgagccaccactcccggcctaggctggtttatgactcacagggtctgtatttcacaataatcatacatattcagcaggttttggggaaaagctatacatatttatgaggggatgtgagtgcatgcacaatgggtaaacacctgtaacatatgttccatgttcactttgggatggggtttttgcgttaaagtgaggtggaatttggttctttgcatcataaggtggactataggacacaaacacagtttgcgtgcagtctctatgagcttgctgaaactggcctgaggtctgcagttacttatcaggaaagaatgtttgtaaggcctgtcctctgtcgatcagcgttgtagtggtctgagttgtaaatctcagtaaagaagagtctgacaatttgcatgatagctcctattgctaggggtttagtaagagtgtggtttttctggcagcagtagaaatttaagaagttgccatgccagctgacagctgagccctgaggtaggcaacgtttgtttccttaaccttaaccttaaggtccatcgtagttgataaaaaggcatctggccaggcctgatggctcacgcctataatcccagcactttgggagggtgaggcgggaggccagcagttctggggccactgcactccagcctgacagacagagaccctgtctcaaaaaataaataaataaaaaagataaaggggcatttgtcttgatcgctcagatcacacaactaataagtagcattctttctaaaagccgcaacaatgctactcctctcttataagagctactgtgtaactcctgcccaactcaaacccacaggcccaggctcagaacacttggctccattgcttcactgtttccctgctagcacgaaccccccaaactccatctcccaacatgccgcgggccccctttctgtcagcctgactcttgagctcctgagaaatgtagtttttccagcggcccagccccagaaaggtcctagccaagaactacagttcccatgtggcaatgcgcgcgccattccggtggaattcaccgcggtctccagtttgccatgatggatgccagaacctgcacctggggcttggtgacgcgatgactgagatgctggagtccccggtcagaaggacgatgccgagcgcgccgtattttctcctgcctctcctcagatcgccgccgttgttgggctgtggagacgtctcaaccaaagtggagccgacagaggccccgggagccgtggtgacagagcggccacaaccactagggggcgggaggcagagcggcccctagaccgcccctagtccgggacctctgggcggtcccgggcgggaagcgcacgcgcaaacgcggggcttcgcggccgctgtaaacaccaaagagcgcctgcgcaagccgagagtctcgggatcgacacgtgggggcgcctgagcgaagataaccgtaataaatagtaacctaacggtccagtcatcgttctgtggtcctttcttttatgattcacaaggaatgaccctcttcatcgcctctcctaattcagtcctcacaacagtccttttacaaatgggacaacaggttagaggaagtcaggcagatttccagcatcatagagagtaaaggaccagggaaggatcaggattcaaggactgcacccaggctctgcttccagcttgctgtgtgactttgggtaattttgttcccttagggaactgagctttctcatttgtaaatgcaaacaggctgttgggaggatcaaatgagatccaggggtgaaaacagcttagtttactttcaggaatttacccacgcggtatataaaggcaaaatattattatagtcaggtgattgtagattgaggaacccatttcctcattctgcaaattgcaaacctgagggcccaaagagggacaggggcttgccccaggtctcagcaggctgtgagcaagagctaaagcctaatcctcctgcctttgggcctggagcccttccttgtaccccaggggtcagtgtctttgttggatacaggcttagattgactgactgtaccctgagaacctaggggagtccctgttcccaattcttctcctacccccaccttggcctgatggaggaagaccctgctgtgttgagatgagcaccagagccaagaagctgaggaggatctggagaattctggaggaagaggagagtgttgctggagctgtacagaccctgcttctcaggtcagtggcccaagtaagggaaagaacccaggtgtgacagatgagggggcagcactaaggggacagactctgaatggaaaggagtgggaaggcagtggacactgtttctgagcttgggaggaattgggtactcaggtaactccatctgggggcagtggagctggaggtgatacctgggctggcctggctgatgagaaggggaagtgatgcgcattgagctgaggtctaggagccactccccagccaggtgaagcgaggtggcacctaggcacaccatggcacctgcaggatcatgcagctaaccccagggaaggggacttttctctgacccttggagcggtggagctgggctgtatgcagctgattctctctagagtgctcttagaggttttgggggtaggttgggggaagggctgggagaccctgaggtctcattacagattgggcctccccaggcaagtcatgaaaggcaggtatatgtagaaatagaaatccaagatccttcaagatatcccagataggccaggcacggtggctcacgcctgtaatctcagcactttgggaggctgaggcgagcggatcacctgaggttgggggttgagatcagcctgaccaaagtggagaaactccatctctactaaaaatacaaaaaaaaaaattaaccgggcgttgtggcgggcacctgtagtcccagctactcgggaggctggggcaggagaatggcgtgaacccgggagacggagcttgcggtgagccgagatggcgccactgtactccagcctggctgacagagtaagactctgtctcaaaaaaaaaaaaaaaaaaaaaaaattagccaggtgtggtggtgtatgccggtagtcccagctactcgggaggctgaggcagaagaatcgcttgaacccaggaggcggaggttgtcgtgggccgagatggtgccattgcactccagcctgggcaacaagaacgaaactccgtctcaaaacaaaacaaaacaaaacaaaacacaacaacaaaaaggtatccaagataattcaatggaattatctggaggtggatcttggattcacctccaagcatttaattatctgggccttcacttatcatttctgtttttcagccagagaaactgaggctaaagaaggaaaaggacctctttttttttttttgagacggaatttcactcttgttgcccaggctggagtgcaagggtgcgatcttggctcactgcaacctccgcctcctgggtttaagcaattctcctgcctcagcctgccaagtagctgggattacaggtgcccactaccatgcctggctaattttttgtatttttagtagagacacggtttcaccatgttggccaggctggtctcaaactcctgacctcaggtgatccattcgcggcctcccaaagtgctgggattatgggcatgagtcaccacgcccggccagaaaaggactctattaaggacacacaaggagttggggtagaactggactacgacagggatctttccattacatggcagtagtcaaacatcttcatcaaacatttatttagtgtctaatgtatactccgagaaggactaccttggggtagcaaatagaagccaggattgccctcagacctggcttttaaccagccctcccagtgatttaagactgtgaccccaggtgagtccctgcccctctctgagcctcaaattgtctgtaaagtggggatgctaagccttgggactgtctcaatgtttacctataaattaaatgagttaagacctgttatcaaggtttacctataaattaaatgagttaagacctgttaagtgcatagaccagcaccaggcccgtggtaagcattcagtaactgttagccactgttgttacttgtgaacacaggtcgaggcaggccgcagatggggttctccaaaagtcaatgcaggggcagagaagcagcagccccaggtctgaccatctctagatacctccacaccctgccctgggtgcctgcatttctgaaagtcaagggaggacccatgtccccatctcctcctccagttctgggaagctggcaggggagaaatgtctcgagtgtttacacctgcacatgcacatgattctcttccccacaacctgaggccaagagtgaagatggtttttactcaaagctacacattacagccctggacagtcagaccagaacaagatcctgggctctttctggccctttcagggtgtggggttgtgcatgagcttcctccctgcatggcagaagtccatgaatgctaacagcaggttcttggtcctcgtttcccctcatggagcaggggctgggggaagaggggcgcctgggtgggagacagggcctgacatcagatacccccccggcccaccttgttagtagttggaggcctggccctgtgctcactttagctctgtttcaagcttccctaatggaagtctggttcaaactccttatttatagaggaggaaagagaatcccagagaggccagaactcactgagagccccacggcgaggtaagcgtgagtctggtccagaactcaagcctcctgacttcaggtgagggctctgcccacagccacatgggagggggcagggcttgattccacctctcctccccccactaccctcatagtcatgcttggagccagctcccaatgtagccacctgggtgggctgtggtttgcagggagggttgggaagatggagaggtaagggaaggagagtacagggcccagtcgggagaaacccagggccggtctggggcgagtggggccgagagctctccttggtgtgcgtgtggctgctgcaggattgtggggccttcatcagtctgaggcagcagaggatgcagatcctgtgggagcacattcctggaggaggggagcaaagcaggctcagaggagtgagtcacggagcccaagccctaaatttagaaggtgctgaaagaggcagtcttcccccgggaagcctgtggagatacctgctgacccagaacaccagggactcacggcagggagcagtggttggcaggagtccccagatagcagtgcccatggaagctgagcctgctgcaggcctgttccaggtgtgggtttggaacctagggtgaaccttgacccagggcagagccttcagccccattctcagacagagcccctagagaattccacccacaccagtcctcacgcggtcctgggagccagcccctggaatgtggacctctcagtgccatgctgccctctggctagacatggccagaccccctgtgcctcactgctgtcccagcatgcagctgtcagacattgaggaggggctgtgtgggtgcaaggagcaaatgccattgacaccaggcctttcgcagctctgcttggattgggggtgagggagggggacaagatgtcatttcagctacctctcttccctctcaaccctccaggctctaggttaaccccactcaggagaaagaaatcattgcctccagactgaggaacaaagatgtaggacagaggccaggcctcggagacagatgccagacctggcggaaggaagctcaggaactgagaactgatagtagctgtggcagttattgagcactcactgtgtgccaggcactgtgctaagcactccacgggattaactcacttcatcctcattgtcatgacagaaattctattagtccacccaacttagatggaacaactgaggccagacacaatggctcacacctataatcccagcactttgggaggccaaggcaggaggattgcttgaggccagaagttcgagaccagcctggggagaccccatctctacaaaaaattacaaagttagctgggcgtggcagtgcacacctgtggtcccagctactcaggaggctgacgagagaggaccacttgagtcccagatttcaaggctgtagtgtgctatgattgcaccactgtactccagtctgggcaacagagcaagatcctatcttttaaaaaaaaatgggctgggagcaggggctcacgcctgtaatcccagcactttaggaggctgaggcaggcagatcacgaggtcaggagtttgagaccagcctggccaacatagtgaaacctcatctctactaaaaatacaaaaattagccgggcgtggtggcgcatgcctgtagtcccagctacttgggaggctgaggcaggagaatcacttgaatctgggaggtggtggtgagctgagatcgtgctactgcactccagcctgggcaacagagtgagacgccatctaaaaaaaaaaaaaggctgaatttcagataagcaacaaatacatttttactataagtacatcccaaatatttgctaaatctggtaatcttacacccaaggcactgcctcacccacattgagaaaccttgcagtgcgacacagccacaccccagctcccacataggcctcagtcactcgtgctcctggagaatgtgcacaccagcaccgaggtgacagaggtctgtaggttgtcactcacacacggctctgcacaccctctctagggaggggcactgggcacagtaggtgcctttcacacttggtctcaccttcgtaaccccttcaggcagaaggtcaggcagggaccattagtgccatcggacagataaggaaaataaggcccagtgagagaagaccctaccccaaatgtcccagcgtatggtccctgggtatggaagctggtctatacctgaggccatgctatctccctgggtaggtccaggatccccaagcaggcccacagcactcaggccacaaagcctcccagaggagccccttccctcaggaacagtaacagtctaggctatgttttggggctgccccccccaaacctctcctatcacccaaacggtgtccctgagccctccccagagtccccaccagttccaggaggtggaaactgtactgagtcaggacactgaggccccaactttgagataaaaaagaagaagaaaccaaaagaaggaagttgtgtgggttgccagaaaagaagctgtggtcccagggctggagttcttgcccaccttggtggaggaaggcctagacaaccttgtccttcctgaagacacaagacaccgatgcccccacccccacccagcctgagcacagagctgaagggagggcctggggtcaggcagatggatcaggcgcctctgacaggaaactcccgggcttttggaaggacgcatcgaccccgcaatcgaactgagttcctggcaggcgccagtgtccaatagacatcgacagcgggaggacccagcaggcagagcggggtgtggccatctgggcctgggaaccctccggaaggagaatccacctggttctgtttcaggccctgcccacctgggacaagcctctggccctctctaggcctgttctcctgtcaagaggcctccccacctgctggggattctgtcaactctgaagtcctgtatggtggtggcggtagggattgcagctagacttctccctcccctgagcctaggggaggcaacggcccctgcgaggcccagagggcagctcccagggttcagaggtgcagggatcagaggatggggtggggagaaggctggaagaggaagcaggacagatgccacaaagttccctgctcagtggtcttgtataatggcttggccaggccatctgggttgaaactgcttacttagtggtgtgtggtctagaacaagttacttagcctctctgtgtctcagctgtcccatttcctttttttttttttttttttttggacacagggtctctctctgtcacccaggctagagtgcagtagtacgatcatagctcactgcagcctcgaactcctgggctcaagtgatcctctcacctcaggctcctacttagtagctgggactaccagcatgtgccaccatgcccagctaagttttacatttttttgtagagatggcgtctcactatgttccctaagctggtctccaactcctggcctcaagcagtcttcccaccttagcatctcaaagcactggaattataggtgtgattacaggtgtgagccactgcacctggctgtcgtcctgtattttatctggcaactccactttggtgccatgtgtggcctggcatgatcaagtgtgtgtagctgtgtaggtctggccctgtgtaataccaaggtggagtgtttctgtatgggactgtgacaggacattaggagaagtgcaggtgggggtgaccctgacctgcactgactttgaggctgcgcactacagtgtggctccctgaggctccagcagctccctaagggcaggtgtgagctgtttgctcagtgaggcccagcaaggtatgagacccaccctgggcaaacacttagatccggctccaggtgggactgggatggaacacctatcgccactgtgaaggacacatccctctcaaggccgagccagccctgggggcctcagagttcttggtgctgaaccttttttttcctttttttttttaactggagacagagtcttgctctgtcacccaggctggagtgctgtggcaacatctcagctcactgcagccttgatctcccaggctcaagccatcctcttgcctcagccttctgactagctgagacctcaggtgtgcaccaccacgcccagctaatttttaaatttttagtagagacggggtttcaccatgttacccagccaggtcttgagctcttagcctcatgcagtctgcctgctttggcttctctaagtgctgggattacaggtgtgagccaccgcgcccggcctgctgcaccctgagggtctctggaactcctcctccatgtcactgcttcctggtgacatcacacaggtcactgcctaatcttctagaacagtgccaggacactgccttgttgccctgcacaacctgtgaatttgctccatcaaaactggcaggcagggttacccctgaggagggggtgggggagaaggggtaggggtgggaccctatcatctcccagaggggagatcaaggcagccatcatctgtcgaactagatggtgagtaggggtgggcatcctggagcaaggctagactttcaggcccctcactgtccaggacactgggcaggttgggggccaccgagggaggctgactcttgaggctgagagagggcagtgaccgtgttaaggtcaccggcaggcaagtggaaggtgtggtatgtaatacggggtgggaggagcaggaccctcaggttaggagctgagaggcccaggttcttattcccttttttttttttttttttttttttttgagacagagcctcgccctgtcacccaggctggagtgcagtggcccaatctctgctcactgcaacctccgcctcccaggttcaagcgattttcctgcctcagcctcccgagtaggctcccaggtgcgtgccaccacacctggctaattgttgtatttttagtagagatggggtttcaccatgttggccaggctggtcttgaactcctgacctcaggtgatccacccgtatcggcctcccaaagtgctgggattacaggtgttagccaccacacccggcccctaggttcttatttctgctttgtccctgctagtaggatctttgtttctctatctgtacagggagggggtggggccagatgcccttagtctgaggggtctttagttctgctgtggggagttgaggggagtgttagggaccaggtcatggggtggctggctccaggcaggtgccctgacccctcccccaacagccatcagggggtagtgaacaaaaagtctggtgtgactctttccaagtgctcccttccccggttgcaggagtctagatcaatcctgagttactggagtccccttagggcttctgacttgctgtgtgatgcaggggtgccccgtgccccccacaacctcagctgctctgtctgcgaggggcacgtgtgagatccaggcctgcccagtgccctgtgtaatgatgcctcacattcccacgccgcttctcagtttgtcaagcgccttctcgtacacagtctcaccttctatgcccactctggctcctgctccgtgatgccccattctggaactgggacccagagagcagccagacctggactctggcctcggggctcagagagacatctcaattcacgtcctgtggaggggaccatatctggggcaggggactgcagtgggcagagcaggggtcatgctttgccaaagctgtttccattgtttgatcttccatgagaatcaaaacttgccaaaccatcatgtaaagatgttaccttaacactttttgttggaaccatgcatttttggacagtgtattcctccctgccccagtcacccccaccagttatatttttagttacttatctgggggtgaaactggcacatatacaactcttttccctgccacaattctcagaggataggtattattattccagatgaggaaactggggctcagagaaggcctgtcaccggcttctggtgacacagctaggaaatcagagggccaggatttgaacccagctccacaggccctttgtgctgctaggttgtgggtcctccccagactcctctcccagagcccctccagccctcctgggctcattcttctgctctggagcagatggggcccttctcggctgcttaggggtgttttgagaaggatatgaatgggctttgtcacgtttgagaggttttcatgagacccagagccagagatactgaaattcctgggaggggtggcatttgcaagggcaaattaatgatgagtagaatgaggtgatacccttctacccacctgctggcgaggtagcctggcctaaacctaggacccaggggatgagcccagggcctggctgcctgccaggtcgcccacctttactgacccaagatccaaaagattcttggttcttctgtgtttggatctgagtgatggtttcattcttgccatctgcacctctctgagtttttatctctctggcagctctctagggtggggaagtccttctatcagtctgccctcactgctacctcctggccttgtcttttttaccctggactggatggtgggtatgagaggtttgctgccctggtacctgctatctgctgaggtgtgttttattggggccctaaaaaggcaggagccaccaggccagtgctgccacctcttttcctcgtggcagatccaagaggatacagttcacaaagcaaagcaggctttggctctaatggggtcccctttgggttttatctgatacccacactgcctgagtgtcccacccaggcagtgtgggtatcaagtaaaactgctgaggcctggggaggggcagtgacctgcctagagttagaggcagaggaggtagatagcagagaatcagagcctgggcatcctgagcccagagccagccccctgccacctactcattcccagacacttttcaggagtgtggtttagaagggatggggtgattatctgactgtgcctcccacactgcagatggaaggcctggagatctaaggtcattcacacaggcctcatgaggacctgcagcacattgtccaggattcactttgcaggatgccctttagggtcacttgccatcatagctccccgctcacccccactcatttttaaaatgtggcctaatttacaaacatctcagtgctttaagcacttcaggaagaaacacctctatttgtgaagcaccgtgacaaatcctcgactcctcgtttttttcttagcacatttaagaaaatctgttccaccctagagctctaggctggtgaggctaggaggcaccttagggttatccattctgattcccttttctggaaatggaaaactaaggaccagagaggaggaggcagcggggcacagacaggaacggaggtgggaggaggctgagatctgcgtgctggtcaggatgaccgtggcaggttcttgttgggccctgttagttgctcatccagaggagctcaccacagtcactgcgacagactgccacactcaccctggcctggcctcagagaagttgagctactggcctcagttcacacagagcagatggaggaagagctggcactaggacccagggggcaggggggagcctccctggctggaagggatggcaggagcgctggtgcaggtagctatggagctctggccaactctgcctggggaggtaagagagcccagagccctgggccagatgctcttgagagcctagtctagtccatagcaggtgtgcgtgtgtgcgtgcatgtgtgtgtgtgtgtacacgcgcgttgtgtgcatgctgagaaggggtgctggtggacaagggccagagtgtggggctggagggagtcccggttcaagctcccaggtaggagtgagactggggtggagattttgcccacatctggccagcttgtgaaccttgagccttgtgggttggatcggcttcctgctgggtttgcacagcccagtgggaatggggttgggtgtgtgtaggcttggtgtgcctctagcttggtgggggatgcaagctgtgggcatctctgagctgctgtggggctgtcatccctgcgagttagtctcttgattgtcatgggggtgtgtgcccatctttggatctctggggtattgcatgggggcgtctctgggttgttctggggacagcgtgcctgtgtgtaaatactgtaggttgttgcagaggtgtgtacctgtgagtatgggaggtggtggagagaaggggttcaccgttaacttccagaattcctcttcttgcacctcgtggcccttcctcgcagagcccactctgtcttggcatctcctcacccctttccctgtccccgctggggacttgcccctcgcgcgcagggtcccctcccagggccggcgggggcgggcgctaggaccctgcggggtggggcggggcggggctcggagatccgtcagcttcacctccgcagcctggaaaatcccgagccgcggccgccgagcccccgagcccccgagcccccagcctagccgggaggggcgcgcggggctggggcccggggcggggccgggcggcgggacccactgctcctcccaccagagcccccgcgcggccccgggtctcccgggcagctgcggcggcggcgctggcaccccggccccggcgggccccggcggagcggcgggcaaaggtgagcagcccggcctggagggcgcccctcctgccccgccacccgccccgcgcccgcccggcgtcgctgcgagttagttgagcaggtcgctccgcgggccccgccgcaccgtccctcccctcgggtcccggccagtccctgggtcccgacgggcgcccgccggccaccgcgtcccatacgcagtccccacgccggccccagggggtctggggcgctcctcgggagggggaccccgaggctgtccagcgcccgtccgcccttccctggggccagcccctacctctctccagctccccacccgccaggaccccgaacagccccacccgcgcccccagcgcactgattcccgtccccaaaccggtcttgcaggtcccaggaaggtggcgtcagcatctgcagccgcgtcgacgttgtcggagcctccgcggaggacccaggagagccggactaggaccagggccctgggcctccccacactccccatggagaagctggcggcctctacagagccccaagggcctcggccggtcctgggccgtgagagtgtccaggtgcccgatgaccaagactttcgcagcttccggtcagagtgtgaggctgaggtgggctggaacctgacctatagcagggctggggtgtctgtctgggtgcaggctgtggagatggatcggacgctgcacaagatcaaggtagggttgcccgctatacctgcagcctccactgcacccttactgcctctctcccggagtctcctggtcctctctccgggctagacacctggctgtatatctgggcccagagagagtctccttccagggaccgggaggagacacagtctgctgggccaagccccatcacacagatgggccaaccgaggcctggagagcaggagtgactcaccctgcctctctcagctggaacccaggcttctgcatgcccctgcctgttccagggatctgggctgctgccaggcccttctaggagagtggtctccctcagggacccctctgctggggaagcctgcacctggttcctgacttgagttactccaggtgggagactgggcccttctctccctgattcctggttctcagcctgagctgggtctccttccccgctttctgcaccctgggttgcccaggacccgattccttactgcccgatgccctgctcttgctctttcccttccctccctccctggctgctcccttagcctcctgcagggactcaggattgtggctggcagatcctgaaggcagggctccaatacccctgccttgcacagagccaggctacaggtgggctggggaaggaaggggcctggggtcaagggaagccaacatagggagcagttgcagacacatcagtcgctcacagccatctcccctgctcttcccaaccccacaattctcctctctttgccgtgcagggcaggcttggggtttgggaccctgggaacgcatatcccccaggggaccagatggggcaggggctcgtgaagactctggtttaagggcctcaatagctgcccccaacacatctgatgttgctgtgggtgctgcatttccagggctggtaggtccccttgcaatgggctctggcaataggctgtgcccttcgccttcctcttccttgccttctcccttctgctatcctcctggaaatgtggaggagtccaccctccccttctgcctgggacctagtctcagacttagttcaggcatgtatcttggccccttaccaagacctgagatgtctgacctttcccctctgaccctgagcccttctgcctcactttgtcttaatcatttacatatagttctgtccatccccacacgattatctgcttttcactttctgcctccccttctcccctctgactctgtctgcaccttggccatctgactgtttttccctctgggtttccatgtgtgtctcccactttgggattcgctgcccagggcctcagaacctgtgtctgagcctgaggagcagggatggggaaggcagctggcatgtcccagctggttgttccctgagagcagggacaggtctcctatccttttttcttttttttttgagaagcctcactctgtctctcaggctgaagtgtagtagcgagatcttagctcactgcaatctccacctcccaggttcaagtgattctcctgcctcccagcagtagctgggactgctggtgcacaccaccacactcagctaatttttgtatttgtagtagagatagggtttcaccacattggccaggctggtcttgaactcctgacctcaagtgatccacccgcttcagcctctcaggtcctgtcctctttgcgtccccagcatccaacacagttagagcagggatattggtggaagagaggggggaggaaagaaccaaggaacaaattgaatgaaaggtgagaagggaattcacgagagcctgactgtgacctgggaaaggcttcaggcgggcagtgcacactgggggagaagtgtagtttccccaccaagctggcactccagaaagtcagaggaggaggggtctgaactgaggccagtactcccaccctctgtgtcaatagggcggagctacctcctccatctggcttggttaatgaataaaccctacccagcccaggcctggaattggtgggtctggggccaggctgactgcaacagaccactcgtggccagatcagacttgtcaggtggccttccttgtgggtggcggggacttggaaaaactggggtgttgtaggcttctggacaggcatacaccctgggcagccaggaccctaccctccttttctttcagactgaacagatgttggaggtgccaaagagcccttggtaatccctatgtcatacccctcctgcccctgggatgcaggcaaggatactggggctcagagaggggcagggacctgcctagagtcacacagctgtctcagcagagctgggtctggaacccagatctacagcatcttggcagtcctcctgccttgcttctccctgcagggtgcctccccagctttgctccctacaatggagagagggtggggagaggaggtgagcagagcccagacccaggaaggaggctgggaccctggttatgggcaccccaaggtgccagctcccactcctgatcctctcagcacagctagttggagctctgggagagatggacagaggcctgtgagcttcccatccccaagattgcaggactcccaggttccatgcagataatcccatttctgataatgagagccctgctctgagccaagcatttctccccatcatctaatttaccccgaggctagtctggggcagtgtagtcttgtctctgtgttacaaacaaagaaactgaggctgagtgaggtaatgttatttgcctaaggtcatgccacagctgaggcaagagtggaacccatgccagcctggctccagagcccctgcccctctccacatgggctcgcatcttagtcaacactgtggcctttaaccccatcaataactctttgaaggcctggaggacgcgttgttctcatcatcctattcttgtttgatggatgagaaagccgaggcccacaaaggggagtggcttgccaaggtcacccagcaggtctggagccagaatccctggggatgactgggtcactccaggaggctgggactcaactgcaggtgtttgctgagcttctgcccccctttccccctcccctctcctgcctcagcctgctctgggcctgtccccagagctgggaaagccagctgacccctggacatgccccgtgctcctgatcccagggtgggggtgggactccacctagctatctacctgattcaattcctcttcctcatctctcttccccttacctgggtccagaggtccctggaagccactgtggctcaaggcccagtagttggagccaggacaaagagaaaggggctgttggaggccacctccaccccttccctccctcctggcctccagcctgacctggccccagggctgcactgtgctctgaatactggaaaagagacagacactacctcctgacagttcagtccctgtcccagggacagatgctgaatgtggatcctgggtacaaggcagggggcagcttggagcctgaactcaggtctctcaaagcccaggtcagcttcctcatggcacctgtattggtgtgagaaacgggagaccaagagcttctgtcagtcattcaaccagggccagctggggtccagtcctggctgttgcatgtgaccttgggcacattcctgcccctctctgggctgcttgcccgtctgtgccattgggccctcttggctccaagagcctctgaactcagcacccagctggggagagatgaggagcaggcagacagcagaggacgtggcctgtgaggccctggcctggatgctcacgtgctctgttctcctgaggctggccgcatgagaggcaggggagacctgcgtatctcctcagaggtcttcagaccctggtggagagaggacagacagttccaggtgacctcctacccactgcacaggcagccttggggcaggaatgaggcctgataagagcctgagcccatgacaggagagacctggccctggagcaggtgtgggagggggtgtggctgagagcctgaggctctgctggccacaggaagctgggcagtggggacctgtctcctctgacttcctgtcctgctgctcctccccttcccctttgggaaaagctcaggcggcccctcccagccctgtctcactgtccacctaccccacaccacaggccacctgggttccagacaccaaagccagtgctcagctcatgacccctcagcacctcaccctctcaccctatgaaatgccagatggctcaggggtctccaaggcccttcccactcttactagtctctgggacttaaaagggtcatggggaaggtcagggccacgtgtgggacaggtctccttaatcccatcaagcagatgtggaaactgaggctcagagcaggaattcacttgtgcacagccaaacagccggacatggctgaagctagatcaggacctaggtccttgactcgccaaggctgagatctcgccactcccttgggctgggttattaacatgattgggcccgtgggtctccctgtgctgtgtcattgtgggagggcaccttagaggagacccagctgggcaagagtccagtcctcactatgtgactttgggggtcatttcacctttctgggtcagtcttcttatcggcggtggcaggcgcatgacttcatctagttttagggccttggactgggtcagttcaggctctagcttggctctgcctgctgtggggcacagtttccccatacaggaagttgctgggcaggtggtctgtagaggctgtcctaaccttaggccagcgtaggggaggctgccctgctggacacagagtgaggatggtggctaaggtcttgccagtctatgccatcagagaggtccctagaaggggatccagaatccagggttaggccctgagctgcctggttccagctctgacttggcatggggggacctggaagaagtagttccagagctgtccttggggaacaggctcccagagagcatgaccccaggtagtcagtgtctagactttgggttggaggagctcagacaagggaaagatcagaggtggctggaggtgttagggaagtcttcctggaggaggtgcctggtttgggttgaggatgttggggaaagaacaccaggatccagagtcctcgctgtgtggccctgggcaagttctctgcctgggactcagcttccttatctgccctgcctgtcttcagagacttcattcattcacacattcagcaagcatccatcattaccctctttctgcttggccctgtgctggaggtgggggatggagagggcaatcagatccaagccctgccctcaaggagcctccagctgggtgctgagacacacacttgtcacaggagctctggaaatccagagagggcatctgaatcagccttgggggtcagggaaggaactccacggaggaggaatgttcaggtgatccttttgggtggggaatgaagattacaagtttgatcgtgtcgggagcattccatacagagcagcagctgtgcaaaggcccagaggtggatcacagggtagtacatttggagaatgggaggtggttcagtgcaggctcagaactcagggggctggaggtgattagagagctagaccgaggccccacgccttgagtcttagaggctctggggtgccaggggaaggttttagacagggagactggtaagagggcgctgctgctgtatttgtctgggcagaggtgccaaggcccaccttaaagccaggttgtggggaatggagcaagggatggaatccagagagccttaggcatgatcatggacgggatatgatggttatagcataactctttgcgatgtgcgcactgtgaagtgttgtgcaggctgggatgcaggacggcatggatgtacagccatcctgtacatggatggggcctgcatcctaagcaggccaaggaacccttatgagccagagtggagtggagggtgcctccaggctgtgtccctgctgggactagagaagccctcagcccccaggctggctctgtgccctccacacccagctgcccaggctcccgcttttaaactttaacgagccccagctcagtttccagccgagagtctttaaagtttcaggagatgagagaaagggagtcctggagacagatgggttttctttcttcccctgcatctccatgcctggctgggccacttggagccagggctgtggatgccgtgaccccagaggcctgtgctctgtggggctccggggcctctgcggggctgttccagtttgttcccgaggagcaggagacctggcctgggtgcctggttgccactgaggatagatggggatagaaaccttatttcagccccgatccctcacctttgcccctgactgggcagatggtggtgctctggcaacaggttggggaaagcagctcagactacgtgttgggcttgagacagccccacccctcctggtgcctcccttcatcccctctggcatgcttggactggccttgatgccctggggcccctggagactcaaaagtatgggcagcagagggtaccatgccaatcacagtagattcctttcacctgtctttaaagagagcctggggcaggtggcacggggcaggtggcacagggcagctggagctgttctctggggctttagcataaccattgccttcctgcccctcagcctgggctccctgaaggcaggtacttgccacctctgatgcttctctggaatcctatgtcctggggtcagtgagcaatgtctgcacatatatactgcctcctgctgcctaatgggaagtagggggtgactgccacctctgctctcccctttggtgcctgagccatttactcatccttgggttttgttaccacctccatctcccccggcttcctgagatcccctccaccatctcctgcccctgcctgccgtctttggaccctgccagagtggctggggcctggtactttgccagagaggtgatgagtcttgaggtagaggcctgatagccagaaggatggagttcccttgtgtgtctccacttgcatacatgcatgcattcattcattgcttcagtatgtttattgaggacatactatgttccaaggattgtgtcatatctaggaatttaggggcaaaccacacagatcagaccctgctgtcatgggttttacatcctgaacgggtgacgagcaaaatagaagcaaacaactaaataagacaccagatgatggttgtgcataaggacgagataacgtgatagggattgaggattctgttggggccttcgtgtgtggagctgaattgtgggtgactgtgtgtgtgatgtggcccttagtctggcagacactgagctcctcaggggcaggtgctgggtttcccatctccccccttcctacccacgtgacagccccgggacaggggcctgacagggtcagtcaatctgtgttgaaggtatgtgcgcctgtgcctgtgagtgagactctgtgtgtgtttctgtgtctggcgttactctgtgtgtgtgagtcacaccccctcactgcagaagcagagttgtctgtgatccaattatgtctcctcagctgtctcctggcagctcccgcccctggctcagctctgactgtgctgtggtttccccttctgaagccccctgtcctgcctccaggggccccagggcatcaaggccagtccaagcatgccagaggggatagagggaggtaccaagaggggtgcagccacctcaagcctgtctctgggtctcaaggtcttccctttggggtgtgttttctatccatctctgttcccctgtcccttaatggttactggctgtgtccttaatgtctctactggtgactttgttcctgtgtcttaaggttactctgtccttaatatttatactggtcatgttgttcctgtcccggttgtttattcattcaacaaacctcttctcatgcctcccacccatcctgccagccacctggagatatcagacctgggtcctgctcttaagagactcaaggcctcatggggagacacatggagacagtgacagccttttgtgagcagtgtggggacagagacatatactcaggctgagtgagtatatgactggcagcatggttgggggacggtacaggggcttctccaggagctggtgtttggatggggcctcaggggaccagcaggataaagcaacaagctgagaaagtcttggtgagttggtcagggaggtaggctcccctgtggcaggggttcagggataacagtgaggaaaagaagaggcagaaccagggtggggaggacattttggagtttagattttatcctgatggcagagaaagagagagagagagatagacagacagacagacagcagaagctttcaggctgggaagagccattaccagctctgggttttaaaaagctccctggccacagaggacagagaagaggatgtggctacaggggtccaagtaaggatggtgaggcctgtctgggcagtgaagaggggctgctgggaaggttgtggccgagtggaatccaacgggcagagttggctagaggttgagagtaagagcataagggacaagtccagagccatgcccactatgacaacgctgggcacagggagaaccatgccccctatggcagcgccaggcacagggagaaccgtgcccactgtggctatggcagcactgggcacagggagagccatgcccactatggcagcaccgggcacagggagaaccgtgcccactatggcagcaccgggcacaggggagccatgcccactatggctatggcagcgctgtgcacagggagaaccatgccccctatggcagcaccgggcacagggagaaccatgcccactatggcagtgccaggcacagggagaaccgtgactgctatggcagcgctaagcatggggagcgggagacatccgtgggctgcccagggtgtggtgctctgggggctgttggggatgaagcctggaactttactggagagctctgggggcgtcagtccactggtgatcccggaagccctgggaggctttttgcctctttgtgtttgcctgtcttgatgtctgaagtcagccctggcctctgtgttgtcccactggcatcccctaccccttcccttttcttctaggtcctccactctctgcctccctttctcagctctcccttctctgtctggctccccctcgcccccccaggatagaagtggagaggtacagggcaggaggccagcctctgcaacgttcatcactgctgcagagctgggcctgctgctctggagcctggaggtggaggtgggggtggaggtccagggaggctgctggggaccagggagggaagggggaaagaggcagagcagggatgagtcactcagccctgcatggagagcggcggagaaggcctagctcagtctgctcagggagctctgtctgggtgagacatggtaacatctctactctccactacagtctcaggggttccacttttgggaagaagatgagttggaggtagctgctgccagatccccttcacttcacaggagagggccatagggattgcctggtcattttgcaggtgggaatactgagtccaaagatggggcaaggagaccctgcattgggcccacaccactgtgctctgtgtccttccaacccccatgccagctctaggcaagccagccccaacatcccctgaactccacacacaccctcaaaagccctagctcccagcatggacttgtcagggattgtcctcctctggccaggtgctggcccacctgattccttgggtcctacacagaacagagcctagttctgagggaatagtctcagggatggactttggatcacgctgggggttccaacctggttcctccacttcacttttctgagccaccatttaccaatgagtataattgtccctcctcccagatagttgagaggatagaattcagtgaatttattataccaacctcttagcacagagcctggcacagagccacacaccatccacatttgctgagaatggatgaatgaatgaacaggtccctaaaggacagctccatttcccacttttgtgcttgttcacctgggttaccttgtggcactgcattgatccttctccttcccccaaccagtccatgccgtttctagttctcaggccatcacctctgccgggagccccttccccctccctttcatctgggtgccgtctcctctcctggtcatcttttaggatccagcttagatgtccctccctctacctgcatttctggcttccctttgtgccttccttgaacctaaagagttgtcattgtctgtgcctgcaagccctgccagacaacgcagagtgttcccaggttaactcagcatcagatgggtagtctcaggccccaactcagctgagtcccagctttcaggtccagggagtaaggagttggggttctgggcaatgcatttaattaggaagaaaaaaagtaaggctgggtgtggtggctcacgcctgtaatcctaacactttgagaggctgagatgggtggatcacttgaggccaggagtttgagaccattctggccaacatggcgaaaccccatctctactaaaaatacaaaaattagccgggcgcgatggcacacacctgtaatcccagctactcaggtggctgaggtacgagaatccttgagcctgggaggcagaggttgcagtgagccaagatagtgccactgcactccagcctgggcgacagagccaaactctgtctcaaaaaaaataattcttttaaaaaagtgatttttatctcttgtataaatgatactgtagcaccagtaatgagaatccaaaaaagaaaaataaagataaatcatccggagcctcagttccctgagtagaactttttcttggttccttccagctctcattcaaaggtgtagagtttgttcatagtttaaaccatgtcacgggtactagtttgtatcctgttttgtttatttaatcttgctctgtagaagtttctcatattgctacagaattattaatgcaggaacatttctggcagctgttccctataggcctgtctgggttctgaaggtgcagagctagctcagtggccacccctgctcgggggaaccctccaccctctgtgatgtgcgtcatcattagggtgatgtcactcttacccgaactggggctgctgctggtagtgttcaggtggttctccagtataatttgctaattgcaaattcaataatatactcatgaatattgtaacataactttttttcttattttatatttttttctgagtacaaatttgtagtcctgggattctgggaactgaattgaaaaatacatttttggtggggtgcagtggctcacacctgcaatcccagcactttgagaggctgaggtgggaggatcgcttaagcccaggaatttgagaccagcctgggcaacatgacaaaaccccatctctacaaaaaatacaaaaattagccaggcgtggtggcacacacctgtagtcccagctactgggacagtgaactgtgatcaccacagtggaccaagaaagaaagagaaatttctttttaaatcattcttatgatttaaaaagtatttgccaaattattttctagaataatggaaccaatttttgctgccactaactgtgtaacagttttaccataccttcataagcagtgagtacctcataagcagtgagtacctcataagcagtgagtattttatatatttttggtaatttactgagcataaatcggtacctcagtacaattttactttacttttctttgactgtcaggactattaaagatcttaaagcaagtcccagaatctcccctgaacctgtctcttggtatttctgacgcctcatgcctccaccccccagccctttacccctttttaagaggatgatggcggaagtagtaatagtagttgtccttgtgttatagagatctacaagagttcagggattttcacggctgcacctccttctgaattatacagatgcactgagggccacggaccagggctccagcattctaaaagtcagagaaacccacacaggctcagcctctttgttggcttacctgcccatccctccattcaggaacagctccttattgagcgcctgctgtaggccaggccccctgcaaggcatggaggatgccaagatgagcaaggggccacagcattgcaggcaaatgaatgcatgacaacgcatgctgaggggggagctgctgggggtctaggagacaaggaaaggtggcctccagcccatactggagagtttagggatagggcaggctgcctggacagggggcagccagtctgaagtttgaagacatattgaagacataataggaagggagctagtgagaggaagtcctgggaaagcattctgggcagtgctggaggaggaggtgcctcagcacccctcatgacagcactgagcagacctctctccttcccctcttcccctgaaccctcaggtctgtgccctggcgcagctcttgggatttttttggggggcggggggagtgtaaagtgaagggtcttggtggtctccattttgggggccccagaaacccagaggcaagaggcaggtgctccatcagcttggcctgatgcttgccttgtgggggcctcagggaagggcagagtggagggccctgaagccagcagctggtgtgtgggtcatgggaggagaagcaggagcagaaagagcagaggggcactggcgctggggctcggacctgctgtgtactgtgggccaggctttgcatctctcagagcctcctctcctggtccagcatggtgagggcagggcctggctgtgggctgtgagggtagaggggccatctgtgtggggtgtgagagagctgcccaccccctcgctgtgcactcacgctgtggagggatcttggcatttttgttattttaaactttgttccttgttgtccttgtgtgtcctgtcctttgggggttagtgggaggtgttcccccagggcagggcctgagaaatcagggaaagttgctggggcctggggctggaggaggggcagctactgccaagggttttagggaccaatctcatctaatccttacaggaccactctgaggagaggattatctctgcttgacagatgagatgttggggctcagagttctttgcccaagccaaggccacacagctgggacatggcagggcagaggtctgtctgacacagatggaccagcactgctgtatgaactctgggcctgcaggcgacaggtgcttcaggtttggagccccagcactgggttctggaaaatctggaacttgggtcaggagctttgtttggaggaggaatctgtgagctttgcctccctggtcagcaaagtgctgcattataaccatcaactaaggcagcctccagttgccagggtgtttgttttagctgggccagtcctgccccttggtgaaggtagcagaaagtcctgacactgtagggtcagtcacacctggactctggttctctgcttcactactgttagctgtgtggattgtacctccctgggcctcagtttcagcatctgtaaaatgggggcgatgcttccttctggggtgttggaagggtcagaggcaatatctgcaaaggatgcagctctgtgcccttgacagctggcagaggtggtttgagctaaatttcagcccctgtggggtccatggtccaggtgcccctgtctcctttgcggggtgctgaatggtcagtgatttcgagcaatggtaatggttattgaggttggggctgttgttcagggctgtgattgatttgatactttgtgccccaccccatcaggaattcttcctctcatttgaatatggttctgttgggaaagggtgatttgcttaacagttactctcatcacaaaactatctgctgaaatgcaatgtatggagaagttagaacagcctgtgggatatttcagagcccaactgaagccaggtttccccagtggtcacctgaagggttctgagtgaagagatcatttcctgggtccctaggactttgggataatctgtgtgccccacatatcccatgggcaaggatactggcgtcctgctgtgtaaggtcttggagggaggattagccttaggtccacctgtctgtgtgtgtgtctgcttgtaactgcctgggcctttggctctcaaggccaggacgtggccccatggaggggacctgacttcctttcccatctcaggtcgaccatctccctgggtcttgggagagactgctgcccctccctggagtggagagtccaccttctctaatgctcagcactggcaagacatcccagagaacacagtcagggggcgggagagaggtggggggtagagtgagatacagcttgggcactggaccctgcactgtacttgtttgtttaagcctccaggcctttgcaccactcgtccccctgctgaaatgccctttcctgcccctcagtggctcagggccttatccttttgggctcaggtgcactctaccatgcagttcatgtgcattcgcctctcctagccctgctcgtgctatcttgaggttttgtgtccctgtcccttaccactctacttggcggaacctctttggggcagggctcaggtctggttcaccgccggtctcccaccacacagttgcacacaggtctggcacacagcaggcttcagagaatggtgaaaggatgaatggaagggcagggcagggtgagatgtgggaggcacccagggtacatagtatctgcaaatgcagcctagtcctggccacgtggaagggtgcatggctactcacggaaacccactggagtaataatagctactatttttttttttaaagactagtcaaatgcagtagtgagaagggggaaaacagtagaacaaggagttcgatctgtaacttactgtgaataatcaattgagatcactcactacatttggaccagccaatagctactctttttttctgttttgagttagtctcactctgtcacccaggctggagtgcagtggtatgatctcagctcactgcaacctcctccttctgggtttaagtgattcttgtgtctcagccttccgagtagctgggattacaggtgtgcgccacgacacccagctaatttttttttttttttgtatttttagtagagacaggttttcaccatgttggtcaggctggtctcgaactcctgacctcaaatgatccacccgcctcggcctcccgaagtgctgggattacaggtgagagccactgtgcccggcctatttttgagtatttactacgcgctaggcatattacatgcgttatctcatttaatcacaacatccccatgagatagctgctattattatttccatttttcacatgaggaaatgaagactcctaagcattaactcttgtgcccaggagacagagctgggattgagcctgggattgccagcctcaaagcctgtgtgggtctttcctgcgccttgcttgttcagtcccttctgattgtggcttcatgggaattggggagctgtggagtgcagtgctggtcccaggggttctcgggaatcccggtttttcaccttgagaacttgagggggtttggagagtggagtgcctgggacacagcctgtagtttctctggtgtcacttgctccccctggcctcagttttctttttcttttctttttgtttttgagacagagttttgctgttgttgcctgggctggagtgcaatggcacaatcttggttcactgcaacctccgcctctcgggttcaagcgattctcctgcctcagcctcctgagtagctgggattacaggcatgtgccaccaccccggctaattttgtatttttagtagagatggggtttcttcatgttagtcaggctggtcttgaactcccaacctcaggtgatctgcccgcctcggcctcccgaagtgctaggattacaggagtgagccaccgcacctggctggcctgttttctcaaatgtaataccactgcatgtcggggtccctgctgtcaccaggctttaaacgtactcaagcccagcatggctccttggtggagcaacaccccttgggttcctgtttccagggggagtttctccgggggcagccaagatggcctaccaggcaacacctgacggcaacatctggtgtggacactcactcagccagggcctaatagctgggggttcctggtaccggcccgcccacctggtgctctccagagactcagccctaccccgccacctgtccctccccaagcctcttagaattacacctttggggcgtggccaccgccgcccgcaggaacaaagatgggtgtaatttcttctgcttagcgcagcagtgctgcctgctgggggctatggaaagggcacgagccaggccaggctagggaggcctgtggacacttacctgacccccacgacccggcctgcctcagtttcttcacctgcgctgccacagcaaaggttcttactctctgggcagaggccttcctccacaagagtctgccactagcctgggaaacctttgaagtttctctttatgagataaagtgctactcagagtttacgctgagcaactggtctgtctcgtggctctgcatgctccggccactgtcctctgtcccagaggtgggtctttggcctctggagcctcaacagccctgctctgggagcctctggaaggaggatggggcagcatgggccccttcccagtgtgcattcagctgctttgcagctgggccctgggagcactgagcctggctagggaagaggcagtcccaggttggattctaacctgggaagcagggttttgttgtcactgcccctccatccactcatggtccaggataacatgtttgaagatttgcagagccaactagcatccaaatttggatttagagaaattctggtttcctcagaagccacgcttgagtgctctttgatggttaagaacacagggagatccgattttgagtccctgctctgctgctttcaggccctatgatctgggcaagttgctgaatcccccaagcttcagttttctatttttcagtgcaggaataataacagcgaccaccagctaggtttagggtgaagaatgagtgcgtgttgaacatttggggcagtgcctggacctccctgtggccgcttaggaggctgtttggatgctaacgatgatgccagatccggcctctgtcttcttcaaccccctttctcaccatcgcgttcctcccttcactttgttccttcattcattcactcagtcactcacatctcattagtctcctcagtctaatgtagttctctctgtgactgtcatgatcctgacacttataggccaattattttataaaatgagacaagccctcattctgggtttgtctgaggttcccttgtgattctatttatgttatgtctctgtggcagaggtagcacagaagtgatacctgtattcctctcactgtgtcctaccaggcaacacctgacagcaacttgtcctgtgattaatgagattccctttgatcacttgattaaggtgctatttgccaggcttctctactatgaagtgactaattttccctttgtaattaataagtattttgatgggaagttactttaaaactatgtaaatcccccattcctcatcaaacattccatttacttgtttattcatacctgtatagactttggtttcctattttattcgatggaatatctacagttatggtcattattgagtttaatatgcagcttatctcagattgagcccatggtagagtgatcaactgtcctagcttgcctgggactgggggatttcccaggatgtgagacttgcagtggtaaaactggggaagtcctcggtaaaccttgaagagttggccactgtgccaggggaagagcccttcaagctggttccggtgtccaaaatctctatcattctttgagtatttgcttacttcctggcacaagaagatgttccatgctcatcttatactttctctgacccagccctggaatcacccatttttccaagaagacctagaaccagggaccttttgagtagcaggctataccacaccacggagactgagccagatggaactcattcactgcccacaggccacactcttgcctgcctctgcaccttggctggctgttctttctgccaggggcacttggcaaacccctacctcctgcactgagattctccatgaagcctgatcccccgacccagcccatggagctgatttccttcttatgcccccaatgagcactttaggacacctccccatttccaaggtgggctcctcctttcactgcagacctctcaaagacaggcctcgaattcatctctgactcttctgggctcagtacagggctggagctgggggctgctgattaaatggttggatctagttatgccccattatagagcagaaaggtaaatggggtagaaagggagggtgaattgtttagggtgacacaaacaatattgcagtctcgagtctgtccttgaaccttgtttttcttaatcctataatggggccaatatcccagagcgctgctgtaagaataaaataatgtgtataaagcacttagtgtaatacctggcacatggtgggtgcacctgtcagtattgctgggggacctttccaaattgttttcattatttcagaattagtactatacatgttagataataagaaatatagacaagtggccgggcacagtggctcacacctgtaatccaagcactttgggaggccgaggcgggaggatcacctgaggtcaggagtttgagaccagcctggccaacatggtgaaaccccgtctctattaaaaatacaaaaattagccaggcatgatggtgggtgcctataatcccagctactcaggaggctgaggcagaagaatcacttgaacccgggaggcgtaggttgcggtgagccaagatcgtgtcattgcactccagcctaggcaacaaaagcgaaactccatctcaaaaaaaaaaaaaaaaaaaaaaaaagaaaagaaaagaaaaagaaatacagacaagcaaaatgaaaccatcacattcctatctatcatttagagatctccactgttaacaccttagcaattgtgcttcctgagcttcctctatgcgtatattttttttcccccaattgaggttatgctgctttttttttgtttgttttttaagatggagtcttgctctgtcacccaggctggagcacacagcatgatctcggctcacggaaacctccacctcccagattcaggcgattctcctgcctcagcttcctgagtagctgggattacagttatgtgccactacgcccagataatttttgtatttttggtagagatggttggccaggctggtctcgaactcctgaccccaagtgatctgcccgtctcagcctccaaaagtgctgggatgacaggtatgagccaccgcgcccaacctattttgtaacctttttttaggcagcagtttccaccattttgtttctgtaaattttcagtgcatttgatactctgatcatgttcacttttctccagttgtcccaaaaatcccctttatagatggtgtgtccaaatcagtttgcaatgcagagacacactttacatgtggttgttatgtcctgccagtcagtcccacccagcccctttgtttacgttgaccagtagaagagcctgggccaggagtcccgtggaatgattcactgtctggctctgtctggttgcattctcatgtggtgtcacttagctcattcctctgtcctctgtattttctgtaaactgaagttatatccaaggcgtgatgggtttcttggtgcctagaatagctagcaggtgtcggtgtgtccttcctgcggcatcccaccaccattagtggggccaaggcctattctgggatgagggggaagacagtgtgacctctccctcatatggttgcttatctcctcttgtgagtggaaaagtattatgtgagggttcccttggcactgtctaaatgccagttctgggagatctttttaaactacacaagaaaacttgtccatttgctgagaggaacttgatcttggggatagggcacttgggtaaaaaaaaaaaaaaatcacagaacaaggatattgagtttcatctcactgagtgcaaacctagggaaacctcgttctgattttacttgctttccagacatgtgatctgggttaaatcctggctctgctacttaccagctgagtgacattgggcgagttacttaacctctttgagcctcaagttcctccttggatttcttatctgacagagttgttggtgagggggttaaataaaacaaggtgtccttggccgtcttctacccagatggaaagctctttgagggcaaggctaatacacagtaagaaatccaggctgggcgcggcggcttatgcctgtaatcccagcacttttggaggcagaggcaggtggatcacaaggtcaggagttagagaccagcctggccaacatggtgaaaccccgtctctactaaaaatacaaaaaattagccgggagtggtggcaggtgcctgtaatcccatctactcaggaggctgaggcaggagaatcctttgaaaccggaaggcagagcttgcagtgagccgagatcacgccactgtactccagcctgggcaacaagagcaaaactccgtctcaataaatgaatgaatgaatgaatgaaaaaaagaaagaaatccaggccgggtgtggtggctgacacctgtaatcccagcactttgggaggccgaggtgggtggatcacaaggtcaagagattgagaccattctggtcaacatggtgaaaccccatctctactaaaaatacaaaaattagctgggcacgtgcctgtaatcccagctattctggaggctgaggtaggagaatcacttgaacccgggaggcagaggttgcagtgagccaagatcgcgccactgcactccagcctgggtgacaagagcgaaactccatctcaaaaaaagaaaaaaaaaatccaaagatgtttgttgaaggaaaaacaaacaaacaaaccacaaataagaggacaggtggtatggccgcgtgataagtaccagggaggaaataaatcatccactttggcattcgactttcatttatgctttcatttcatttaacatgtagctattccaggctccaggctgaagcaaccatgagcctctgcccacgaggagctcacaggggtctgggagggcacagacatagagatgcattgtgtgggagcccagaaggtctggctgggaaggcttcctggaggaggagactgggctgagtcgggggagatggtctctggatacagaggctgtctgtctcctggcacaggtggctttttggggagctggacagggcttgtggcaagaaggaagtccatgctggtttcagaggcccctgttctttgctgtcctctttctcttcctccccctctgcctgtctgccttctggtcccctggccaaggctctgagccccatatgatcctgacaacccatatatcttgtctgcagtgccggatggagtgctgtgatgtgccagccgagacactctacgacgtcctacacgacattgagtaccgcaagaaatgggacagcaacgtcattgagacttttgacatcgcccgcttgacagtcaacgctgacgtgggctattactcctgtgagcaggcgtagcacgctgatcccagtccccttggcctccatccaggcctcccaccaagcctcctcttcccccctccctcctgtggttactcacatgaccaagctgctcggagacttgagtgctgagagatagagctgccctccctgtccactcctagacccttaggcacacacccatacacttacaaatacatatgcactcacatgttcacgtatatacatacacacataggcatacactcaatcaggcacacagcccccacccacatgccacatagtcccaggcacacattttcatgcacactcatactgtttttctcttgtacactcacgttcacgtagacaaaccagccaggccaacaatgtaagggctatgtgaggctgtaaggagcagggctggctggagacagtagggacaggtcttgccctgtctcttttctggctccagctgtgggactgtggtctgggagggaggtgtatctttgcactggagagctggcagttaattaggcatccctgcatctctggcctctgccacaccctcccttgtaggcaggtggaccagtggtctggctgaactgtcccttgccccccacagggaggtgtcccaagcccctgaagaaccgtgatgtcatcaccctccgctcctggctccccatgggcgctgattacatcattatgaactactcagtcaaacatcccgtgagtcaacctgccttccctgcggtggagcaggggagagggtcaggcagcgcaaggctgaggctgccaccatgacttcaatatgacttcgggcaggcatgggcccactggccctcagtttccttcctgtacagtgaggataatggctcctctctccctgctgggtctcttgagcagatcaggagagggcagtgtggccacctctgtggcaagtgggtgggatgggctgacttcgattggttgggctctgggacagggaaatgaggaacaagaggtgagaggcagggtcctctggtcctccctgaggctaagccaccttgatctccctgggcaaggacaggcaggtatagctggcctgggcaagggtgagtgtgtgtgtctgtgagtgcccatatgtgctcatgagccctgaccccagactgggggcttttctgaggggaacaggaaaagcttcaagaggggctaggatgacctactctggttcttccctttctctgcacccagaatcaggactgatctgtaacagatgtcacggcatgtgaattaactgtatgtgtgtgtgcgcgtgcgcgtttgtgtatactcacaaaaacatcttctttgcccccaccccgagtctcacctccctgtgccttccatccccagaaatacccacctcggaaagacttggtccgagctgtgtccatccagacgggctacctcatccagagcacagggcccaagagctgcgtcatcacctacctggcccaggtggaccccaaaggtgagggcttggccctggcagcctatcatgggatccttccctataccacaggggtggggcctgatctactagggatccagaagggcatctgttaggagctgttttgcattttggggcatttccatccaaagccttccttgaaccaaggcttgggactttacagtggtttgaaaagagtgggccagggaggtgccactgccccactgatgaagctgggagcacttttcctgggctctgccgtccccatgctctgccttgttccctgctcactggctgttccctctgcctgtcctggatgcctgggttttctaggccttagtcttctctccctggggatggctcagccacccctgtggcttctgtcacaagtggccatgtctctctcagctgagattcagattcctgtggccatcggccacctggacatctcccttcggatgtcttccaggcacctaagcctcgttgtgtccagtggggaactcgccatctttcctcctaacttgccccttgccctaagtctccacttttcagtcacccatgcccagaacctgccatcatttggggtcactccctcttcctcagccaaatccagccattgatttttttttttttttttttttgagacagagtttcactcttgtttcccaggctggagtgcaatggtgcaatctcggctcactgcaacctctgcctcccgggttcaaatgattctcctgccccagcctcccgagtaactgggattacaggcatctgtcaccacccccagctaactttttgtatttttagtagagatggggtttcaccatgttggccagcctggtctcgaactcctgaccttgtgatccacccaccttggcctcccaaagtgctgggattacaggcgtgagccaccgcgcttagcccccgtcactgattcttattgattctgcctcctcctcggcagttcctgagtctggcatttctctccataccaactaccttgtctgtgtataacagcggccagaggaatttctctaaaacacttatctcctcatgactctcatctgcttgaagttactctgtggctctccattgccctccaagaaaagcctaagccctgtcccaggtctcctggtgtctctcacacctcacccatccccacttctgtgcccaggcagcccttccccgaagcctcccctcctcgcccctccaggggtgctgtgggtgtcacctcctgatccctgacactcaggggagtcactggctccctgttctgtagtccattcccctctagtagaacagtcggctcctgttgggcccccagtgagttcctctctgggtccccagggctggcccagggtgggtgtcacagtgaacatggagtgagtgagtgagtgagtgagtgaatgactagaggatggggaagccttgagcatccttgcctggaaatgcttcaagccccagagcgcacagtggtccaggcctagcactcccccggcacctcattgtgttgggtgtcagaggtggagtggacacttgggaatgagatagggtggagagctgggcagtggattccaggtcaggccaggctggggtgctcagccagaggcctgtgtggtcaggggaggacttggaaggacaggcaggggaggggctgagcgtcaggggcattcctgggagggaggttaggttgagaagggatgtcagtgtgattgagtgaggcagcaggtgcagcagggtgggtcagagtttccacccatgtatagcctgtgcttacctaggaccctgtggttttcttccacgtaatctttgaggctgggcagagggaaagtgggggacagagctaagcctgaggacttcggtctgaggtggaagggagtgagggtaaaggcttgtaggacttgcctcacacacctcctcctcatggggaagacagtggcctccctggaagctctgggcagagggtggggcttttgtcaggggcggaggggctgggtccctgaggctgcttcctcccttccctgccctcacaggctccttacccaagtgggtggtgaataaatcttctcagttcctggctcccaaggtgagtggccttgggattttggggaggggtgttgaagactggaaagaggactatggaatgaggtgggtggagtcaagcctggagcctgagggccaggcgtggtggctcatgcctgtaatcccagcactttgggaggccttggcaggtggattacctgaggtcgggagttcaagaccagcctggccaacatggtgaaaccctgtctctactaaaaatacaaaaattagctgagtgtgatggtgggtgcctgtaatcccagctactcgggaggctaaggcaggagaatcacttgaacctggaaggcagaggttgcagtgagccgatatcatgccactgcactccagcctgggccacacagtgagattccgtctcaaaaaaaaaaaaaaaaaaaaaagaatggagaatggagcctagggcccagggagggcaagtagggctgaggagtgaagttttgaaagggagccagtcaggatgctgggggctgagccgctggaggggggtgtggagaagacctgccccctagccaccccctgacccggcggggcggcgggcccacaggccatgaagaagatgtacaaggcgtgcctcaagtaccccgagtggaaacagaagcacctgcctcacttcaagccgtggctgcacccggagcagagcccgttgccgagcctggcgctgtcggagctgtcggtgcagcatgcggactcactggagaacatcgacgagagcgcggtggccgagagcagagaggagcggatgggcggcgcgggcggcgagggcagcgacgacgacacctcgctcacctgagcgccgcaccgcttcagggacggagacaggaccgggcgagccctggggcggcggccgctcctgcactttctcccctcccccacccggcacctggtggcaccgggccaggcccaggcgggtgctgcagcctggctggacagagccccaataaacgatcccacagcctcagccggctcatcactgtgcctgcttcccacctgcctcatggccgctgccgcggtcccctgcgtctgcccttaattttgttaaggttgttgatcatccggccgttgatccttccagcatctcctcatttcccattgtgtagcggggaggagacggggtttatcactgccccccttctgtccatactctgttccattctctgcccgtatctatccagctgtccttgttgagcggtcattttggcattcacgccaggctatttgctttctttttcactgctttaaggcagcggtccccaacctttttggcaccagggactggttttgtgcaagacaaattttccatggatcaggattggggaaggattggttttgggatgattcaagtgcatcacatttatcattagattttgataaggagcgcacaacctagatccctcgcatgcgcagttcacaatagggttctccctcctatgagaatccaatgctgctgcagatctgacaggaggcggtaatgctagctcagcctctgctcacttcctgctgtgcagcctggttcctaacaggttcctgacaggaccagtaccagtctgtggcccaggggttggggacctctgctctaagggaaggagcaggccttgacagagaccctgggtcaggagtcagagggtgaggttctactctgtgtccttcggcccaaggccctttgggtccaacctatggactggggtctgacactcctgtcatcccagaagggaggtggaggggtccgtgggtctcaagccacagggctgtgggtctcagagctgaggctggggcagcataccctggagggaggtcaagggtgcaggtgaggggcctcagattccagtgcagttggtggggaccaggcttggtgattcacgccctccctaggtcattttgaagacctcaggactgtgttaacagaaatggtagggtccccagaccccctatccccttgccagtggtcagatgccagccttctcaccctgtgctgcacctcgctggtctgaagtctagagggacgcctgggcctcccctgtgatctgtggcccccaggtgccctctgctgcccaagggacacccctgctgccaggaccagaggaggggcctatgctctgctcctctgcagtgtttttgaccccatatgaacttggggcccggaagttctccgcaaggtctggccctgttctcccctcccggaaagctcctttgccttagccctaccaccagaagacacggtctactcagtcaactctttcccagagggacagggtgaatggccagtggggggcaggcaggagattctagaactcataaaaatgggttgcttcccagctttgcccaacactggctttgtaactttgggcaagccctcagacttcttggagccttatttcctaacccataacctgggatgataatttttgccatcaagcagaatgtaaggattgagataaaaggaataaattgcccagcactgggactagcatgcagtaggtgctccaattaatgacactttcctcttctcagggggtaaaccctcatcccccgcaatgtgagatctgttcttccaaatataccctttgtgcatataaagaaattgaagcccagggaaggtctctggcgtggctggccccggaggtgttctggacacaggacccagaaatgtctgccaagcttggtaccctcatctgtgtatgtgctgggaggatgggtgggaatctcctgttctctaggtgtgggtgctggaacctcaggctgcagccttccgctgagggatccttgggaggtgtggctgggtgggtagcttccccacaaccctgcctgtgggcacccagggagggaagtgagatacccttgaagaatgtggtggaggaaggatttcctagaggaggtggtcaggcaccactgacggccttcaactgcctcctatccccctgggggtgtggccctcttgtgggtggggtgtatgtcagggcagactcaccagaagaggggtggcgagagcagggagactcagggagaggtggactcagcgggcgaggtggcgggggttagacctgagcctcaggagacagtcggaagacccgcaagcagctagaggggcaggagagagacacagaccgacgggtccggcgggcgggccaggccaaccaactccaggaccgtgactaggcggggggaggggccgatgannnnnnnnnnnnnnnnnnnnnnnnnnnnnnnnnnnnnnnnnnnnnnnnnnnnnnnnnnnnnnnnnnnnnnnncgggggggtgggcgcgcccggccccttgctgcaatttggcggtggcggtgtaagtcggtggcggcgccggtacgcctggtccccgcgtggagtctttactcaaaacaggtcagtgcggctgccggagcctcccccgtctgcaggcccctcgccacattggcctgcagtttccccattctgcagaaaggaacgccgaggccgcgcgctgcttctgcttccccgggtcatcttgtctgtttacctttttgggcgtgatgggggggtcgcctcttgaggataagccagcgggccagagacggtagggaaggggggtgaaccagcgggacccggggcttccagcccgtagccctttggcgtgaagggtctctggagtcagccgccctcgggcgccttggggttcccatctgtgaagtgaaggctcccacctcgttggccgctgagacctttacatttctggagatctgtacgaccctatgccctgggcctggggctccagtgaccttgggcaggctacttccggtctctgcatctcaattccccaccagtaaatggggcatggcttccccagagcccctacctggcccagttgctggtgaaagaaagtatgtgctcagggaatggggtcacgctgggagtggggtggttgggcctggagagagcaggcttagggtgcagcctgggggcaggggatgggtgtttggtgcagggccggcggggagggggggaatctggccagaagccatcacgctgtggtttctgctatataccgtcccttcccccacatcccatatcctggggagccttccctgatcccagataggtgggaggggggtgcttcagggccagatacctgggggtactcggaaggatttgactctttggtgggtcccagggtcccagactgaggcactcatgatacctgttcgcggagagtccccagaggccaggctgggagagactgcccagcaagatcatcacagggtagaaggagcccagcagagccttgaagacaggtgtggacaggtgcaggccccaggggaggggatgactggaatgggcttggcagttaagtggcaatttacaaggataaggaccctccaaaggcgagggcgtagcttgtgcaaagtcaggaatttggatggtgtgtctgaggaatggcagaaagatgggtgtggctggcagaggtgtagagagaactcatcctgtgtcccattcctggctggggattgtcaggaccgggcctggggaccttgcctccccattggctacttgcatattggagtagtttaggaagggggtgtcccaggcagagtaccggtgactgatgaggtggagggggcagaggccaccagagccctgatggcccccaggttttgttttgcattcaagcctcctactcaaccccagctttatacccccaccacctgggctccagccatgcttcacacatccagcctcagctttttgtacagattgttaatcctcctcccaaccctctagaagcttcctccccattcaaatccccaggtcctttgggacttcaggtttcagagatgggctgctgttgcccctccttcctgcccagccttcagtcttgtgtaatggcacagcttaggaagggtctccttggagctctgtggggatggggcctgcagagccatggggatcatgggacctggggccccgagtccttgtgcagccaccaatcactatgtgactctacaagtccccaaattcctcagagcctccatttccccatctgcaggatggagtgatcagccctggcctcatgccccaaagagagacggtgctggggcaatagtcaggcctatctgctaagatgctggggcaataggcctatctgctaagtcctgtctccagcattgagagtttgaatgaaagaaagagagaacccaggggaaggggtcagtttagaggggttgggggggtgtctgagagtatcgggggctagtggtggaccaggcctagggcatcggctggaggtggggagtcccttccattttccggagccctctctccttcccacccaactctcccttggctgagctcaaagccacccgccactgcccaaacaagtggcctctgttcccagggtagggggaggggaggcaggccctgggctccaggcccgcctgtccagcgctgaccctggccccccgcccctcactctaggtcttaacccttgggggcctggaccgggccctgggctccttgagggctggtgattcttgttcaccagctgtcccctctaccccgcttcaggctcccaagggttctgtcacatcaggaggggatgcagtaggaaatggggaaggaaggagggaacaagggtgggggacaggctggagcagatatggccatggacacttagagaccatttggcctaaaagcttctttcacagatggggaaactgaggccaagagctagagatgagggtaggatcacacagagacccctggtgggggtcaggacaggttctgtctcctagtctggcctctctgggggaaaggggagagagggagagggaactttttttttttttttgagacggagtcttgctctgttgcccaggctggagtgcagtggcacaatcttggctccaccttctgggttcatgccattctcctgcctcagcctcctgagtagctgggactacaggcgcccgccaccacacctggctaatttttgtatttttagtagagacggggtttcaccttgttagccaggatggtctcaatctcctgacctcgtgatctgcccgcctcagcctcccaaactgctggggttacaggtgtgagccaccactcccggctgggagagggaacattctttgttgagtacctgctgtgtgctggacactgcacatttgtcatctaatgatttacataattgcataagagcataagacgaccatcaccctccaatatcatagtggaagtaacagccttagagaaagctgagtaataacatcagtgagaatgaggtcagcaaacatgcctatagcactgttgtaaagttttatccatattaaccaattccaccctgccaataacccaagaaattaggtgacattctacagataaggaaactgaggcacagagaggctaagtaacttgtgtaagaatacattgggagggtggtagagagacagggtcaggacccaggtgttcattgcctcctttgtctgacttcactttgatcttactctttgagcacctcccagggctgagtgaggtgctttccccgggtggtgaccgaggcagccttgaacagtgtgtgaccccagctaagctgacccagtccccgctctggagcagagtccagtccctcgggcagctcttctcatttctttctctggtcttgggcaggttagagtcagcaccctccacagccctgtgcagagaggtgttatgttttagaaaggagttctgtgctaagggtggccactccagggttctgaacagcatgaggatttggtgggtggggagacatccccatccaatgtgcatgccccacaaaactcagaggctgccgctgaatcaaccccagtgtccccagctctgatcagagataacattttttccaccttcccctacccctggccaggcccccagactgtatgtgcattccaaccagggatctgaggaggacagtcccacctggaggcagatgaccccagatgtgaaagatggtggggggcaatgcatggattgtgttccacatggtcttcctgtggaatgtctctttttctcatccttgggccgtagtacagaggggaagagcctgtcccatagttaggttatctgtcctaggccactgggacagtcaaagagtggctgggaggggacgtggagttaagtgaccagttcaataacaaatcattttttttttttttgagatggagtcttgctctgtagcccaggctcaagtgcggtggcatgatctcggctcactgcaacctccgcctcccgggttcaagcgattctcctgcctcagcctcccgagtagctgggattacaggcacgcgccaccatacccagctaatttttgtatttttagtagagacggggtttcaccatgttggccaggatgatcttgaactcctgacctcgtgatccgcccgccttggcctcccaaagtgctgggattacaggtgtgagccactgggcccagtcaacaaatcattatttaatagtagtaataatagtagcagtagctattgtttcttggaagctgactatgtgccaggcagtgtgctaagcactttatatactgaattcatttaatcctcaaaatagtcttctgaggtaggcaccattcccattttccacatgaggaaactgaggtcccaagaagttaagtgatttgtccaagatcatccattacatagaatagctgggaatctacatttccattgcttcacagtgaaaaccacaagcactgggaggcattgcagacagaggagatctaaacccagtcctaccctgggaatgcctagtcagtgataggcagagactagagggccacctggtcaggtgacattgctggtgaccaactgtggatctggggtgccctcaagggtacaggggtatcctgcttgcagacgggactaattgccgtcaaatcctgagcccccgtggccctggccctgggataagcgtcttgtggaggtttggtttctgctattgtcctatccaccttggctcttgttcatacagtggttctcccagaccccattttgctgatgagactaaggccagtagaaggtggtgacttgcctgcagtctctcagccaaggaaagcaagagcaggccctggaaccccggcagggcgctctgaggcctgcattctacctctctgcttgaggcctggttggggcttcctgaagtgttgagcttccttcagaccctgcccacactgccttgttacaaggtccaagtcttttctccctgaccaaaccaggaacctgatcctgttgggatgctggggctttgctacagcagggtgtcagtaactgaacaaccctggaaacatggttctagagcccagagacagggaccacctatggtccagtgtgtggggctcagggtcagaggggcctagaggaagattaaggcatcagagagtcctccctgaggggatgtgttaaaatctccctcctgtccttatcctcactgttgtgagggcaacggtaaaggcaagagggtgggagaagatcaggagggccacttctctatccccattctcagggcagaaccaggggtcacacctggaatcttggctgtcagtggccctgggggagcttgggctggccctgcctccttctggccaggccagtgctggggtggcttaacccccgggacagaagaccaggagcaaggctgagctgccactgcatttcggctttccaggtgccagggtctcccctgccagctttcctactggcccagcgagcactgccccaccctgggcatccccctctctcctccccaacccataatgcatagggcaggggtctgcctgtagtcaggtgcagagtcaggaacccagggtctgcctcaggcctctagctcagtgagagacctttggctgggcatttatctttactgtactcaacttccctggagcttcagggaggggcagtaaggagcgactctggggatcccccaggcttaccagcccccagttgtgaacaggtcaggacagaaaccaaccaaattgggcaggtgagagggggagggggttggggggagggggctgttccactcctctccactcccttctcttcacactgagcagctagaattttaagattctgagtctgagattctaggctggtgagattcgaggattttagggttttatgtgcctgtgagtcccagcttctgaatttccgaaattctaggttccgagagcctaaaaagcctcgagttgggctgggtcacccccaagttgaggctggggcatgtgccgtgcttcagcctggttggtgcagacggctgaggcctggagagtttctcagtgctggctggtgggtcagaggcacagctggtctccaggtgccgggtgctccctgcatctaccacccccagcacacacccggctgtctccccttcaagaaatctgggaaccctgcagactaggtggtagcagaggggcactcagttatcttggcagtggggagagatgggccaggccccctctgcattcacgggttgtagtggggctgttcccgtggacactagggcggggttggggagggctggtggctggctaattcaaagagcaaggtcagggtcacactgctggccatcagggccagtatgggatgtggctcagcagaccaaggttaagccttgaagggtcagagccaggctcaggagcctctgcagaaggtggtggacagagatcaagagcctgaggggacgtattgctctgccttagggtatagaaggctgggcttgactgagggacttaggagctaccatccctagctgtttcccgtgctgtctgggcctgtgggcacagcagctgcactcaagaggctgcgggtcaggagcagctctgcccctcagagaagcacaacccagccaggagcccagccaggcagtcgtccaggagaagggcactgacagccaagattccaggtgtggcccctggtcctctccacctttgagacatgacacaggtgccctttgggacacaggagtgtctcctggaagattgcctggccaggctcctggcggggtcgtgcttcccagccccagcctgcagcacatccctccagtgggtactccatgcgggtatggtcagcattcctcatgggttggggtaggaggggcccagttctgcaccccttgatgtgtgagctgggcaaggctttcacccacttgaaacttggtctctcgggtggccaggcatggtggctcatgcctgtaatcccagcactttgggaggccgacgcgggcggatcacaaggtcaggagatcaagaccatcctggctaacacggtgaaaccccgtctctactaaaaatacaaaaaaaaaaaaaaaaaaaaaattagccggacgtggtggcaggcgcctgtagtcccagctactcaggaggctgaggcaggagaatggcgtgaacccgtgaggcggagcttgcagtgagccgagatcgagccactgcactccagcctgggcgacagagcgagactccgtctcaaaaaaaaaaaaaaaaaaaaaaaagaaagaaacttgggctgctgtgtgggtttgcagcttaaatgcaagtttgttcccagtggccacagtgtgcctggtagggagaatgggccacccctttccactccaggagcagagttggagactgacacttttccagatgataacaggaaagctctggggtagcggctcccgtgcttggtgaaggggcaccagagccttggctaaaggcttccctcccctgctctgcctggggctgctctcttccttctgtctctttctcggctctaaagatggacatgctaagcctagggagtctgaagatccagggggtgtctagtggttctgttccagtttctgttccacggacatgaaccaggacactcatttgcctctactgcctgtggcctgaaaacccacatttctcagtgcagaactggcttagcccacttggagatatgtgggggacgggggagggaggttg

SEQ ID NO: 527 - DNA, 1434 bp, Homo sapiens
attattatagtcaggtgattgtagattgaggaacccatttcctcattctgcaaattgcaaacctgagggcccaaagagggacaggggcttgccccaggtctcagcaggctgtgagcaagagctaaagcctaatcctcctgcctttgggcctggagcccttccttgtaccccaggggtcagtgtctttgttggatacaggcttagattgactgactgtaccctgagaacctaggggagtccctgttcccaattcttctcctacccccaccttggcctgatggaggaagaccctgctgtgttgagatgagcaccagagccaagaagctgaggaggatctggagaattctggaggaagaggagagtgttgctggagctgtacagaccctgcttctcaggtcccaggaaggtggcgtcagcatctgcagccgcgtcgacgttgtcggagcctccgcggaggacccaggagagccggactaggaccagggccctgggcctccccacactccccatggagaagctggcggcctctacagagccccaagggcctcggccggtcctgggccgtgagagtgtccaggtgcccgatgaccaagactttcgcagcttccggtcagagtgtgaggctgaggtgggctggaacctgacctatagcagggctggggtgtctgtctgggtgcaggctgtggagatggatcggacgctgcacaagatcaagtgccggatggagtgctgtgatgtgccagccgagacactctacgacgtcctacacgacattgagtaccgcaagaaatgggacagcaacgtcattgagacttttgacatcgcccgcttgacagtcaacgctgacgtgggctattactcctggaggtgtcccaagcccctgaagaaccgtgatgtcatcaccctccgctcctggctccccatgggcgctgattacatcattatgaactactcagtcaaacatcccgctccttacccaagtgggtggtgaataaatcttctcagttcctggctcccaaggccatgaagaagatgtacaaggcgtgcctcaagtaccccgagtggaaacagaagcacctgcctcacttcaagccgtggctgcacccggagcagagcccgttgccgagcctggcgctgtcggagctgtcggtgcagcatgcggactcactggagaacatcgacgagagcgcggtggccgagagcagagaggagcggatgggcggcgcgggcggcgagggcagcgacgacgacacctcgctcacctgagcgccgcaccgcttcagggacggagacaggaccgggcgagccctggggcggcggccgctcctgcactttctcccctcccccacccggcacctggtggcaccgggccaggcccaggcgggtgctgcagcctggctggacagagccccaataaacgatcccacagcctca

SEQ ID NO: 528 - protein, 160 aa, Homo sapiens
MEKLAASTEPQGPRPVLGRESVQVPDDQDFRSFRSECEAEVGWNLTYSRAGVSVWVQAVEMDRTLHKIKCRMECCDVPAETLYDVLHDIEYRKKWDSNVIETFDIARLTVNADVGYYSWRCPKPLKNRDVITLRSWLPMGADYIIMNYSVKHPAPYPSGW

SEQ ID NO: 529 - DNA, 1392 bp, Homo sapiens
gtaataaatagtaacctaacggtccagtcatcgttctgtggtcctttcttttatgattcacaaggaatgaccctcttcatcgcctctcctaattcagtcctcacaacagtccttttacaaatgggacaacaggttagaggaagtcaggcagatttccagcatcatagagagtaaaggaccagggaaggatcaggattcaaggactgcacccaggctctgcttccagcttgctgtgtgactttggaccctgctgtgttgagatgagcaccagagccaagaagctgaggaggatctggagaattctggaggaagaggagagtgttgctggagctgtacagaccctgcttctcaggtcccaggaaggtggcgtcagcatctgcagccgcgtcgacgttgtcggagcctccgcggaggacccaggagagccggactaggaccagggccctgggcctccccacactccccatggagaagctggcggcctctacagagccccaagggcctcggccggtcctgggccgtgagagtgtccaggtgcccgatgaccaagactttcgcagcttccggtcagagtgtgaggctgaggtgggctggaacctgacctatagcagggctggggtgtctgtctgggtgcaggctgtggagatggatcggacgctgcacaagatcaagtgccggatggagtgctgtgatgtgccagccgagacactctacgacgtcctacacgacattgagtaccgcaagaaatgggacagcaacgtcattgagacttttgacatcgcccgcttgacagtcaacgctgacgtgggctattactcctggaggtgtcccaagcccctgaagaaccgtgatgtcatcaccctccgctcctggctccccatgggcgctgattacatcattatgaactactcagtcaaacatcccgctccttacccaagtgggtggtgaataaatcttctcagttcctggctcccaaggccatgaagaagatgtacaaggcgtgcctcaagtaccccgagtggaaacagaagcacctgcctcacttcaagccgtggctgcacccggagcagagcccgttgccgagcctggcgctgtcggagctgtcggtgcagcatgcggactcactggagaacatcgacgagagcgcggtggccgagagcagagaggagcggatgggcggcgcgggcggcgagggcagcgacgacgacacctcgctcacctgagcgccgcaccgcttcagggacggagacaggaccgggcgagccctggggcggcggccgctcctgcactttctcccctcccccacccggcacctggtggcaccgggccaggcccaggcgggtgctgcagcctggctggacagagccccaataaacgatcccacagcctcag

SEQ ID NO: 530 - protein, 160 aa, Homo sapiens; identical to SEQ ID NO: 528

SEQ ID NO: 531 - DNA, 1510 bp, Homo sapiens
gtaataaatagtaacctaacggtccagtcatcgttctgtggtcctttcttttatgattcacaaggaatgaccctcttcatcgcctctcctaattcagtcctcacaacagtccttttacaaatgggacaacaggttagaggaagtcaggcagatttccagcatcatagagagtaaaggaccagggaaggatcaggattcaaggactgcacccaggctctgcttccagcttgctgtgtgactttggaccctgctgtgttgagatgagcaccagagccaagaagctgaggaggatctggagaattctggaggaagaggagagtgttgctggagctgtacagaccctgcttctcaggtcccaggaaggtggcgtcagcatctgcagccgcgtcgacgttgtcggagcctccgcggaggacccaggagagccggactaggaccagggccctgggcctccccacactccccatggagaagctggcggcctctacagagccccaagggcctcggccggtcctgggccgtgagagtgtccaggtgcccgatgaccaagactttcgcagcttccggtcagagtgtgaggctgaggtgggctggaacctgacctatagcagggctggggtgtctgtctgggtgcaggctgtggagatggatcggacgctgcacaagatcaagtgccggatggagtgctgtgatgtgccagccgagacactctacgacgtcctacacgacattgagtaccgcaagaaatgggacagcaacgtcattgagacttttgacatcgcccgcttgacagtcaacgctgacgtgggctattactcctggaggtgtcccaagcccctgaagaaccgtgatgtcatcaccctccgctcctggctccccatgggcgctgattacatcattatgaactactcagtcaaacatcccaaatacccacctcggaaagacttggtccgagctgtgtccatccagacgggctacctcatccagagcacagggcccaagagctgcgtcatcacctacctggcccaggtggaccccaaaggctccttacccaagtgggtggtgaataaatcttctcagttcctggctcccaaggccatgaagaagatgtacaaggcgtgcctcaagtaccccgagtggaaacagaagcacctgcctcacttcaagccgtggctgcacccggagcagagcccgttgccgagcctggcgctgtcggagctgtcggtgcagcatgcggactcactggagaacatcgacgagagcgcggtggccgagagcagagaggagcggatgggcggcgcgggcggcgagggcagcgacgacgacacctcgctcacctgagcgccgcaccgcttcagggacggagacaggaccgggcgagccctggggcggcggccgctcctgcactttctcccctcccccacccggcacctggtggcaccgggccaggcccaggcgggtgctgcagcctggctggacagagccccaataaacgatcccacagcctcag

SEQ ID NO: 532 - protein, 291 aa, Homo sapiens
MEKLAASTEPQGPRPVLGRESVQVPDDQDFRSFRSECEAEVGWNLTYSRAGVSVWVQAVEMDRTLHKIKCRMECCDVPAETLYDVLHDIEYRKKWDSNVIETFDIARLTVNADVGYYSWRCPKPLKNRDVITLRSWLPMGADYIIMNYSVKHPKYPPRKDLVRAVSIQTGYLIQSTGPKSCVITYLAQVDPKGSLPKWVVNKSSQFLAPKAMKKMYKACLKYPEWKQKHLPHFKPWLHPEQSPLPSLALSELSVQHADSLENIDESAVAESREERMGGAGGEGSDDDTSLT

SEQ ID NO: 533 - DNA, 1081 bp, Homo sapiens
atgagcaccagagccaagaagctgaggaggatctggagaattctggaggaagaggagagtgttgctggagctgtacagaccctgcttctcaggtcccaggaaggtggcgtcagcatctgcagccgcgtcgacgttgtcggagcctccgcggaggacccaggagagccggactaggaccagggccctgggcctccccacactccccatggagaagctggcggcctctacagagccccaagggcctcggccggtcctgggccgtgagagtgtccaggtgcccgatgaccaagactttcgcagcttccggtcagagtgtgaggctgaggtgggctggaacctgacctatagcagggctggggtgtctgtctgggtgcaggctgtggagatggatcggacgctgcacaagatcaagtgccggatggagtgctgtgatgtgccagccgagacactctacgacgtcctacacgacattgagtaccgcaagaaatgggacagcaacgtcattgagacttttgacatcgcccgcttgacagtcaacgctgacgtgggctattactcctggaggtgtcccaagcccctgaagaaccgtgatgtcatcaccctccgctcctggctccccatgggcgctgattacatcattatgaactactcagtcaaacatcccaaatacccacctcggaaagacttggtccgagctgtgtccatccagacgggctacctcatccagagcacagggcccaagagctgcgtcatcacctacctggcccaggtggaccccaaaggctccttacccaagtgggtggtgaataaatcttctcagttcctggctcccaaggccatgaagaagatgtacaaggcgtgcctcaagtaccccgagtggaaacagaagcacctgcctcacttcaagccgtggctgcacccggagcagagcccgttgccgagcctggcgctgtcggagctgtcggtgcagcatgcggactcactggagaacatcgacgagagcgcggtggccgagagcagagaggagcggatgggcggcgcgggcggcgagggcagcgacgacgacacctcgctcacctga

SEQ ID NO: 534 - protein, 291 aa, Homo sapiens; identical to SEQ ID NO: 532

SEQ ID NO: 535 - DNA, 38641 bp, Mus musculus
  misc_feature (1)...(38641): n = A,T,C or G
cctcccttatagccaaccaccaaccagaggtagtgggaaagaaaggatatgggaaaaatggacctgcttagaaaggttctttggagcaactcccatctgtgttgtctggaaattggcagttcagttcactggttagcagcggcagcttgatccacttgcaaacacttcatggatacaccagcagtccagtttggtagagtcgggttagcaacaacaatgatacgacctagcagagacagacaggcctcagtctcagcttgagtcaggaggagggaccaacagaaacatcagaagttctcagctgtgcctctctcagggaagtgaagattttgcgaagattggagatccacaagctttgcacagctagctgtaccagcaggccaagctctctccatcattctgtggagacctatttttaccctccaaacatcacatggccatcacctgtcttgcttcagctcgtgcatcccatcaccacgtgtcctcggaagcgacaacaaactgcagcacaccaccagaaatttttggtgtgtttctctctatggtgtcctgacaaatgcacctcaactacgaaatataaagtggatcaatatgtgcatgttgttatcaaaaaaaaatcctttgtcatgtgtcctttcacagacagagatagatttaacagaataccctcacccctctgtctgcttcagctgaacactccttcacgagtctgcctcagtctttcacctgtgtccactttaacaaaacgttccttcacatgtttgacccagcaaaacaccatccaaccaactttccaaagaaccccgaagtttctacttcaagctggcccactggcagccataagtgctatctctgttggatggaattattctatgcttcacatcattggccactggctagtgtcattttagaagtctttaggtgatgttatatgtgatctatcaaccaggtactgaggccaggactctgagcaaggtgaccaatcagtatagaattcctctaagagggttttagatgggcaagtatctatggttttgtatcaagaagtaaaactgacagggatatcattaaccaaaacacaaaaaaggaagacaaggagaagtgtgtgtctggggggggggtggggcggttagggagactattgatagttacaatgtctatgattcacattcattaagatatctatactctctggtttcattggtaacattctagcacgtcagaactacagccctagaaaataaaccagaggttgcacaaggtagtcagtacagcagagggaaaacaaaagggatattatgagggctagagaacctggtacctgatatataactgatgtacataccaagaaaagtagaccacaaagaaagaattataattttgttcctttaaaagtaaatgtagtaagcatagagtttaaaactccatgtgccatacatttctaatctttataacttttgatcctttctgacagaaggattgttgattcagtgtcgggaagtcattacagggcaggtagcaagtaattaaacgattagctgcactgtaagatgcttaacttcagggttaatccctaagatctctttggtgtttctgaaaatatccaagaaaacaagggttcaatccatgtttcctcctgtttggagccccctagacagggttccccacttttaccaatgcacatggagcccaacgggagcattctaaacacaaaagagaagcctacagcctgggtccctctttacatagtgttctacattttgattaaccagaatagaaatttgcatcttgaaaacaggaaacttgttgctttaaatgtaatatcctcttctagaaaagagagggtagagagtacatcagaagtccttccatgaggcctgatttcccaaagcatcaaaatcagaatagatgacaaaaaactctgaaatgtacaaaccagtgcctttaatgggtttatagacaaaaaaaaaaaaaaatgcttaacacatctaatacatgtaaagaatagtacacggatgtgttggcatcgagtctaggctccacttcacagttacctggcaacagccaggtgtgcctgactcactatgaaaggggctgcttgccccctcctcactttcttgctctcttgctctctcctcttgctcttgcttctgctccccctcactccctatgccccccaggctcatgaccagcctctactcctctgctccaccccacccctctacctttctttcaactctcctccccatgccctgaataaactctattctatactataccatcatgaggcacccccacccctccgcaccttaccttgcctccactaaacatatccctggccttctctttttataaaacacaatacgatgaatgaggcgattgattgaaatcaatccatgtaattcatcctattaacagagcaaagaagaaaactgatgtggtctactcattgatgaagtaagcacttcaggggcggataacaaaaaacaagggtgtgtggaaaaagccatacacatccttatgcattgcttatcaggaggcctcaaggagcccaaaacaagagtggctctctccatttctcttggtcacccaccagaactgtatgataagaccttaaagctaaagacatcctgtgccctgattgtcagatttaaaagaatcaaactagaactgagctggcaaggtcctccctggtacttgcttttcataattgaaggtgaaatgcaggctgctggggtttggggcaggagaagggcactgtggtcttacccagctgtgaatcccacagcttccaatatcaaaccaagagacaaggtgtagcagaatcgtagctgtatctggcttgaattttaagtgattgcacctaggctttgaagaagccttttgttagtaattatcatcagagattttatggggttgttctttttttagggattctctcaggctttacataacttaggggcaaacatggccaaccaggaagtctcctgtggctgactattgcttaaggcgatgatgattctttcaagacaacccctagatccgataagaggttttggtattcagaaattgacttgctttaaaatgccttttgtacaataaagaggctctgcaaaatggggttggcatccagtccttgagaggctgaacagccaccaccacagccaccaccaccacagccaattctctctcataacccagaacacaggcagcatggcttccccactgatttaatagtggcccaactgttatggaaatgagtaacagctttctaattgaattccaggcccagtccacagaaaggaattcatgtttggtactgtaaaccggatttaaaaagctcgtgactggagtggtcataggccctaggggaatttactgctgttctacagaatagaaatggcatcacactgccttctagacacctgagtgtgttaggcaaccgctaatctcagccttaataagaggaattcagggagtgaatgcaggggaatcctgtctccccacagctctgaaaacaagggacaattgaatattctgccctaaacaggacatgtataccactggtgtcaattccatgaaggggacaaagaagcccagacacctcacagaagatgattcatacatgacagacacataggatgttcactaatggatatgttgaagaactgtaagatatgaccaatgagaatctctttttaaaaaatggaggcagtaaatgctggcaaggatgtggaaaaactggactgcctgtatattgcaagtagaatagaagatattccagtcactggttttggtattgtcaaacagctggtggatgttttacaaggtttctaaagttaaatatgaatgtcctatatgacctagcaattgcattcctaggcaatttctctagggaagtaaaaatctagttcacccagaaacttatgcccaaatgttctggtggcgttaacttgccccagactggaacctacccagtgttctgacaagtaaacaaacggtggtatgtttgtaccatgcaacactgaacatgcagcnnnnnnnnnnnnnnnnnnnnnnnnnnnnnnnnnnnnnnnnnnnnnnnnnnnnnnnnnnnnnnnnnnnnnnnnnnnnnnnnnnnnnnnnnnnnnnnnnnnnnnnnnnnnnnnnnnnnnnnnnnnnnnnnnnnnnnnnnnnnnnnnnnnnnnnnnnnnnnnnnnnnnnnnnnnnnnnnnnnnnnnnnnnnnnnnnnncttgctctgtctcttgctcccttatcctattttccccctctcccctctcttctccacatgctcatggccggcctcttctcttctcttctcttctcttctcttctcttctcttctcttctcttctcttctcttctcttctcttctcttctttttttctctctccccctccctttgtgctctctctctctctgtctctctgtgtgtctatgtctgtctgtctctgtctctctctgtctgtctgtctctgtctgtctctgtctgtctctgtctgtctctgtctctgtctctctctctctctctctctctctttctcggcctttctctcaattcccttccttatgaccatggatggcagacacagccaaaggggttgcgtgcttctttacagcttgttgtaagcctatcactgtcttacaaacacaatgtcccgaaaaggtcctaaaggatttaacaagaagataaagaaacatcaacacagaagcaatcaaatgaatgtttgttcaagcttgagtgtaggcagtctggttcgctggcatggctgcccggcctcacttctccctttgcttctctgaagccatcctgccctctccagggcccttcctcttcccctagctgctacctacaacttctgctttcagagatcctgttccccagtgtattattctctaacactcattctgccatgtttgttgatagcctatgatgagtgtgggcagtgttccggcccctgataaaggatagaacaaaatcattgttgcaggagagctctcactctcgaggagaaatgataataaactgggtaaatgtacaaagagggcacaattttaattttctatttcatttatttgggaggagaactgtgcatgtgtgtgtgctatggcgtgtgtgtgtgtgtgtatgtgtgtgtgtgagggtgtgagtgtgtgtgcatccatgtgtgtgagtgtgaatgtgtatttgagtatgtgtgtatgtgcatgtgagtgtgtatgtgcatgtgagtatgtgtgtgtatgtgcttgtgagtatgtgtgtgtacatgtcagtatgtgtgtgtgtgtatgcatgtgagaatgtatgtgtatgtgcatgtgagtatgtgtgagtannnnnnnnnnnnnnnnnnnnnnnnnnnnnnnnnnnnnnnnnnnnnnnnnnnnnnnnnnnnnnnnnnnnnnnnnnnnnnnnnnnnnnnnnnnnnnnnnnnnnnnnnnnnnnnnnnnnnnnnnnnnnnnnnnnnnnnnnnnnnnnnnnnnnnnnnnnnnnnnnnnnnnnnnnnnnnnnnnnnnnnnnnnnnnnnnnnnnnnnnnnnnnnnnnnnnnnnnnnnnnnnnnnnnnnnnnnnnnnnnnnnnnnnnnnnnnnnnnnnnnnnnnnnnnnnnnnnnnnnnnnnnnnnnnnnnnnnnnnnnnnnnnnnnnnnnnnnnnnnnnnnnnnnnnnnnnnnnnnnnnnnnnnnnnnnnnnnnnnnnnnnnnnnnnnnnnnnnnnnnnnnnnnnnnnnnnnnnnnnnnnnnnnnnnnnnnnnnnnnnnnnnnnnnnnnnnnnnnnnnnnnnnnnnnnnnnnnnnnnnnnnnnnnnnnnnnnnnnnnnnnnnnnnnnnnnnnnnnnnnnnnnnnnnnnnnnnnnnnnnnnnnnnnnnnnnnnnnnnnnnnnnnnnnnnnnnnnnnnnnnnnnnnnnnnnnnnnnnnnnnnnnnnnnnnnnnnnnnnnnnnnnnnnnnnnnnnnnnnnnnnnnnnnnnnnnnnnnnnnnnnnnnnnnnnnnnnnnnnnnnnnnnnnnnnnnnnnnnnnnnnnnnnnnnnnnnnnnnnnnnnnnctttacaagctgagccgtccctccagtctttagacctgtagttggagagggcctctttgctggcctaatatttggataggaatctataaagacaggaaacaaattacatacaggaatccagggaaagactcctccatcctgcagagaaaatcgctttccatgctagaaaacaacttttggtgaagagacgagagggagcttgcaaaggagtaaacagtatacagacgagtgtggggacgagtttattcaaggaaccagaggtgagtgtattagttagctgctgccgtgtgacaaacaagccccagcttgaatggacaagacagaaataatgatgttgtctcttctgaagatgtctcagggtcagttcaggtcatagctgggtggcttctgttcagggtcttagattttaacaaggtgtcagcctggactatattcatcacttcaggagattcacttccagaatggctccctcacgtgatctgggcagaaagttggagttatgaatacatatattcctaaatatggacagctcggtcgtatgttacttgcattgtgttttcagaactgtttcgacactggacaaacaatcggtgtgctgttctctgggaagagcacctctcctgctcccagctctccttggttgcctgtagttctttgtgtggagctgagtgaggccttgtgggcttttcccagtccacttcggcacatccattgatggtgttcttgttaggctgccgttcaggcagtcatatttgtgaggctttacgggtgcaggttctgaggttactaggaaacacaatctcacatcaaactccgggcctcctggcttttataatcattccacagcctcttctgcagcgtcctctgagccgtagatgtgggggtgttgtgtagatgtgttcaccgggactgagctccacagctctgcattttgatgggctgtggttttctgtagtgatctctgtctgttgcaaggagaagtttgcttgatgaggggtgaggactccgtttatctgtgggtgtactacatgcaaatgtttacagatggctgtcaggaattatgctcttttagtcaagtggtgtttgtagattctccacctataaccacgacttcttagcactgggttgttagctagggttccagtagcagcctagtctcctcctgttgagcagaccttaactccaattagagggcctttttatttagagcacaactgaccactgtatttaaactacctacatattatcttgcagtttatacaatagctctgttttgcggttttattaactttgttaagtgtaattatgcactgttttctgtttctttgcttgtttgtttctttgtctgtcactaatgagagggctttactatatagccatgtggccctggtcgacctcggatctgcctcagccacctgcgtgctggttttcagacttgtaccctgtcttagttagggttgctattgctgtgatgaaacatcatgaccaaaataacttgggacgtgtattagtcaaggatctccagagtaacaggacttatggaaagtttctatatattaagtggatttattggaatgacttacagtctgcagtcgaactatcccaacaatggacagctatgagtgggaagtccaaaaatctagtagttgctcaatcccacgaggctagttgtttcagctggctttctgcataagctggaatcctcaagaagtaggtaccaacagatgagctggcaagtgcaagcaggcgaagaagagtgagtcttccttcttccgctgtccttaggtaggcctccaacagaagctgtggcccagattaaaggtgtgtgccaccatgcctggatctggaacttgctttgtcccaggctggtcttgaactcagagatctgtttgcctcagtctcctgggattaaaggcatgtactaccttgcctgggcctctatgcctcaagagctccatgtcaagatccaggtcagaaagaggtacagaggccttggagggtgcggcttactgtctggattctcatggcttgctcagcctgctttcttatagaacccagaaccaccaacccaggggtggccccacccacaatgggctgggcccttcttatcaagtagaggtatttttctcaagtgaggttccttcctctcagctgactatagcttgtgttaagttgacataaaattgtccagcacacagcccacaatgctccctcatttccttcttatatgttccctaggtcagaagcccatgtctgaccatatgactgccagtctcaggatcactccagttctccttactctaagggcataatgtagtctctcaattaattttattaaattctattgtctattaatatgactcagacagcccccaaataatcaaggcaaagtcctatgagtttatttaatcagcttagcacaattattgggtgggtgggtggggtcacatctaatctatttttctatacactggactatctactttcccaactgtgattccacaagtagttgatgtttgagtcttcccccatcgccccccacacacatcccaggttatttctgctccatcagtctatcctggtgggtggggcatttcacggccacatactcctggttcatcatgtctaatggagacctcctgttttctttctttcctttctccttcctcgtcctctcttcttcctctccttctctcttttttcccatggtccctacctgcgaccctcatcctggtaactgaaaacccacttgcctctattctacccggtaattggctgtaaccacttttatctagacaatagttttcaattggagaatgagatttacatagcatcactggtctactgaagatgttgggggacaaccagatcttggtggccagtacttagcatttgaatccatctcagcaccaggcacaacccacagcgacgacgttcaaaataactgaagagcatgcagcctatttggatgaagagaggaaaagtgccattttccccaagtgccttggttgaggtagcagtcactatgcatattaatacaaatactgattattgaaatgttagtataaacgagcatgccttgttgaccgcagtttaggagcaagttagagaaagcatcgaaacagagacaccgcagccctgtctccaacgggactgcacacggtgttggcagcttgttctcatttaaatttattcacaagccactcctcaaatagctgcaaagtcaattttagcatccatgtgattgtcacagatttctgcgttagatgaggaattaatgaagctgcattttcttttacaatctacattcctagatataaccaacagtgtttgttcttgcttttgtttttacttttgtttatttcgtttgaaggcttgtggtgcaataatacacagcaacatcttcaaatgaggaccaataaataaagctcaaaaaaaaaaaaaaccctctgtctgaagacaaattatttaaattgagcacccagtatatacatttaacattcataatttctactcctcatttcctaccagcaagttgtcttactataaataaatgaattataaataaaagaaagctgacaggagccttagaggagcagaagtttgtagtacacaataaagcctattacttctgtttaggggccctatgtctctccccgagattatggcttttagacacgcacacccagtcattgaaagcacacacagctacagggaccctcccccagcatgcacactcatgcatctatgtcacatgggctggtttgctccacatgtgtcattaattgtcaagaatgctgctcagacggctgatcggaagataggcagagcaggatatcgagacagcccagggtttccttgtcaagtaggtttaaaacattttttcctcttctctctctctctctctctttctctctctctctctctctctctctctctctctctctctctctctcaacttccttcctgttctgccagtcctcagtcagagttgagagacagaggtaacctccagagacacagggccgactggagcctggaatgtaagttgaatgcctgaggtggggaggctgcaggtgggcgcagtgtcctgtaggaaatctcagaaccaccctactgcccttgccagaggagctgttgctgttcttaggaagggcggttctttaaaccgaacttcatgataagaaagtgctaaagagattgctggagcagaaaaggggaagtcagccctgagaaggggagacaagctgaaggaggtaggagagagtaccctgctaccagaatgttctagagaagggctctggggatacctggaatgggggcggagtggggggcagcactgggtggtttccttgctaggcaggagctggaatttggctgcgctcaggaaaaggataaccctacctctgatactgactgtgctgtggatggcggcttgtgctggggtggagatgtgtggtttcctgtttttgagcacactttaaagagactgtttgaaaggagagaaaatatggtgcagagctgtcaaatgctaagcccttagcaaaaaccgggggaattaaattcctgcagtgggctgggcaggaagatattcactgtgactgccaaaaaacaaagcagccctccacatcaaggggaactgatgcagacccagaagatgtggagaaaactgtgggagaggcactaggagagtctgcgtgggcccagctataaacgtggtcggtgggccttccagctgtcgtggtctgaactttggccttgctagaagggctctaggcatcacttggtatgctctcctctctttctcaggttttccagtcagcaagtgctaaatgccccattttgggtaactgtagcatgggtctgagaagctctgagtagtttttcactagggggtgagggagtcagactcttacaggaaggcccccaaaccaccccttcacaaagacactaagagccttctgaagtcaggcttagcacactgggttccccacatgagaactcaagaagagatcagcggtgacctgctggctgggaatttgtcaccagcaggtgccatttctctctgtggcatttctaagagtgtacccctgcccgtttcaaacacagtgcaagtttactgacaaaatgagcttattcttttgtgagtccttcaggtttctgatagaacatgatcaactctccttccacgtggcccacactctgccagtgagaaacaaccatgactagccggcctaaacctcatgggcatcttcttgccctcggaatttggtccttcaccattttggagagtgtgggtctgtcccagggagacaggctttgctcagccgcgcacagtttggtttccactggaagctcagaacagcagagttactctgaggggaatttacgggaatatgatccgtgacaaacttgagctaacaggaagggagaagaagccctgtggggtgaaaactaagcagagagaaaagacagccagggttggctcagagccctctggtgtgccaagcctggtattgagaaacacacgattttcatactgagagaatggagaagaatattaaggaagtgttcagcagttcatatagtggtacagtaaaagagttgatagccttagacattgtctgtggaagaagatttctctaatcccacatgtggaatgtctttgtttgcacagcagcctcgctgctgagatggactacattggtggatggtgggttgagtcccaggtagagttttgcaggcctcaggtcttgattgctcctgaaagatcactggtactttcatccatacaataagatcttaccaggttgccctttattgataatattctggtttcctcaacccagctgactaaaactccacaggggattcctcggggggtctaataatctaagttcgagtgtccatgaaattgtctttgacatctcacattaatttagaaccttggtgactgtgtctagttttttgcctagtcatggcttccagagtgcagctgtcttttaagattatttaaagtggtatttgtgaaagaggagtgtcacgcagtgtgtgtgtggggggggcgggggggagcatagtgattcgtactcttatctctttctgcaccgaaaaacagagctggaagagtgcgcttggaatgcacaggcaggaaagaagagtctgtggtcctcagtgggagtggtgaggcccgactttaattccagcatttgaaaggcagggcatctctgtgagttccaggtcagccaaggatacagagtgagaccccgtcttttaaaaaggtggtggtggggggtcatttttaaaatgagggggagtgggggaggagnnnnnnnnnnnnnnnnnnnnnnnnnnnnnnnnnnnnnnnnnnnnnnnnnnnnnnnnnnnnnnnnnnnnnnnnnnnnnnnnnnnnnnnnnnnnnnnnnnnnnnnnnnnnnnnnnnnnnnnnnnnnnnnnnnnnnnnnnnnnnnnnnnnnnnnnnnnnnnnnnnnnnnnnnnnnnnnnnnnnnnnnnnnnnnnnnnnnnnnnnnnnnnnnnnnnnnnnnnnnnnnnnnnnnnnnnnnnnnnnnnnnnnnnnnnnnnnnnnnnnnnnnnnnnnnnnnnnnnnnnnnnnnnnnnnnnnnnnnnnnnnnnnnnnnnnnnnnnnnnnnnnnnnnnnnnnnnnnnnnnnnnnnnnnnnnnnnnnnnnnnnnnnnnnnnnnnnnnnnnnnnnnnnnnnnnnnnnnnnnnnnnnnnnnnnnnnnnnnnnnnnnnnnnnnnnnnnnnnnnnnnnnnnnnnnnnnnnnnccctcctgtgggaaatcccctgctcctgctcttcccacccccaccacacacacacacatctctccatgtcttccccttagtgactcagaggtgcaggataagaccccggccaacccagcctttcaacgtagcgagatcttcctgcattttcccctagccagaggcagtgtgtccactaactgctctctgagcccgctgactcatctcattcagagcgaaccttctgtcaggcgaagggtcaagaaataagatcgaaaatagaattgttaatgtgaggtatttcaaaagaaatgcagtagtcactgtcccatttttgcgttggatttcatttataaataatcctcacaagttcctaaccttcaaggtcctgtccttcctccgcagagaaacagactgcatcctgaggaggaagggctgcagagaatcagttatacccaggagaagcacttcctcctcaggacgttaggtcccacaaaacacataatgacagggccacgaaggaaggcaaggaaaggaattaatatttattaaacatctactggccaatccagcttccaatccagccttttgataccttgaggaaggctcagttttcctacatgtctggtggatgttaatagcttgcttaggtcctataagaagttggttttggagccaggctttgagacccctggtccaccttcctcaaagttcatgctttgtcaaacgtgtaggtcactttgttaaattcacctggggtgggattaatttcctagaaacgtaggatctcatttttttttatggccagcaactcgtatgaagctatattaacagccagacatgtgtgcactgactcaaggttaagtcgtatttacgatttcctcctgtctttactgttcctataacctgtggctcacattgtctcctgcacggtggctggtgattccttgcaataattcacgggatgcactaatttgtgtctaatttgctaagttttgactcagaacagttccgtaacgtaactgttttaagatagtcttgtgatgcaaaaggtaaaagaaagatgatttacatctgggggggggggggagtaggttatgttgtgttttataaaattgtggtataataagcacctccacgggccctgcagtggtgctcccctgaggaatcgccatcataagacaggcctagtaccaaaggaagtttaccgggggaagggaaggggacctagaaaagggacagagacagagagggggcagagaaggacagaatgacagagaagagagaggggaagagaggaagatgccagctgggaacaagtggaggagagagagagagagagagagagagagagagagagagagaatgaaagatcagcattcttatacacctggctccacaggctattgctaggtagctgttgggcggaacctagtggaattgtcaataatgtaaaatgtagcacctttgagaaaatagtatgaaatttaaataattaaacacttctactcttctcttaaatacactaatgaggcgaagtaactgaacagtgactcagcggtcactcacctgcaggcagtgagatacagagagaggctggggacggtgactcatctaaagaccatctctcaaggtagagaaaggagagtcctcgttgctgaaacatgtgcccaagagttcactgccagagagccagaagcaacctccatatgcgaggggggctgttcagtaaggagatgatcatccccaaatggagtagatctaaccactagccacagggctacactcaaagacacagataccacctgatatcctctggtcctgtatatccaacatttcaggtggataattacctcctcgatttttgggttcaaaatcttaacgatccagcaatgcctcaggagcaagggagctttctctacagcaatcaactggactgcattcaccagaaagttacaggttcaaggtcatgtttaaccttagacattgtcttagacagtggtaagattatggaggacttcagggtctgtgaatctgtggactaaagaaagaaagaatcataaccttattcttttcctctttggactaaagactaggatgattgttatatttttaaagagttcttttgattttacttttatgtgtatggctgttttgcatgcgtgcttttgtgtgtaccatagaagcaagaagagagggctggatctcctaaactagagttacagatggctgtgagcttccgcatgggtgctgggaatcaacactgagtcccttgggagagcagctggtgctccaggccaccgaatcatctctccagcctttgcttagcagattttttaaagagtcctgtcatctccaaaacgtgaagaatcaacaatcagaccagctggaccttgtagaaattaccaacttctatttcttccctggctctgaccagcaacttaaatgtcagcgtgctctgaagggaggggtttgtaaactctcggagctcaccaaccagctgtgaccttcctgcggctttgatggcgaatcacctcttcagttattttgtgtttattaccgtaatagccacctttccgcagtgagtgactttggatcatctgatctcatatctccttcttatgctacaattcttgtcaaatcattgtaatgtggctcggaaattcctgcttttcctgcttcagttccagacaccatacattgtcttctactcttcaatgtcttcaaaaagttgtctcagttttatgagatacttataagtctgcaattcattatgacaatttaaataatatagatttaaatcatacataattagatttaataataagattaaaacccggatggaagaattgatttggcaacatccacacagttacaagtttgcaagtcctatgtcagcctctcctccctctctctctctctctctctcccccttcctctttttctccctctttctcctgctcttttcaagaatgagaatccacagcttttgcagggcattgagatcgtgaactaacgactgggtatagtgacaccatccaacagtcaagtgctcaatggtgaactgttagaattgtgttccagaaggttctgtcctgtgagctgagctgcatttctccatgccaatagcctcgtgctctgacgggttggttatggattctccactctggctatccgataggctgtcatgaccaccagataagaatgtgcctcatctgattcatcttttctaacttgttctgcatcagccccttaaaggttatactcaaatcgcaacatccaccagctgcatccttctttatttttacctccagttcattctattctttctctgcgtgctgtttggggtatgagctgggttagtccttatgttttccctggtgatcttcagagtcatggctgttgatctctggagtctcctctttgagcgatgccagtggtttaagtgagacaagggttaccatagcaactggcctatctgcttcctttctgtgtaggaagtgggcctgggcattgcaatgtagttttcagagctactagggcctttggtgtttggcctgatgttttgttggaagacaaatgaagaggacccttgtttctccctctcccatcctctgtcgcaacctttccctcatcccatctccacacttcaccatttctctttcttttgttccgtaagtttgtttttgttagtcttcatttctaaattattttccttcttgttgcattagtaacattaagacccagatctgcagtgaaattggtccatgagtttcctcatccccagagaattcccagacgttctcagtgcctctggatgagatgatgtgatgaagaatgtcttaggtgtgtgacttataagaaatggaggctttgccattcttgcctggacttcacctaggcagcatctaccgtggcttgcagacacatgctatgacagtcgcagctgtgtcatgaggaaccagtctcttaattctcgggactcaagtttcccagtgattcagtgagaaggtgaactattttacctcttaaccttgtctgaactctaaaaagcagtattgctaggtgctcatcaacactcacacacacaaagataatattactccatttccttctcaatgttgtttacacaagtcaagtaaatgcagacactgattagaggagtgtatcatgatctgcctatgtgagattttgtgggtgtgtccaaccttttgacaagttccacagtgttgtcacgtataaatgtcatgttcaagaatcatgccatcaagaaaaaaaaattaaagaaaaatctcataatgttttaagctgatgattttgcattaggtcacactcataattaacctgaagtgtgtagagagagcatgagatcactagaaatacagggaaatacaaaagaaaatgggaagctggcttaaggcccctaataacaaatgtgtaattatcatcttgcctagaggaatttgagtcctttgctattttgtggcatgacaaaagaacataagatacagagggaaaggaagcaatcaccgatgataatcataaaatgcagagctgtgcaggcgttacgggtggggttggcactcaagaagaacccagaacccacccgttatctgctctcaagctatgattaacagcatggagcagaaccgttcatacccgccaggcaggcattagaggtctgttttccccagggttcccctttaaggtctgataagtattcaaggaaagaatacgttaataagaagaaaccagccttttgaccacagataattgaccagtgtccagaagtcagcaaaactcagattgcgcatactgggaatagcaatgggctaagctagaatggtcgatcgctgggaatagcaatggggctaagctagaatggtcgatcgctgggaatagcaatgggctaagctagaatggtcgatcgctgggaatagcaatgggctaagctagaatggtcgatcgctgggattgtttatgttacctttcttcactgtagtgcatggctcacagaaaagctgttcattcttacagctttattctataagcaaaaattaagacaagtcagagaaatgactggaaatactatctatttcatggaatatatgtgttgaggaacaatttgaaaatcaccgatgaatacagatctccactaaggtggtaccagtagcaaccccagcgcctaatgaaccatcattctctctctgaaatagagagcaatcaagatgacggagaaggatgcacagccacagctggaagaggcggacgacgacctggacagcaagctcaattataagccaccccctcagaagtccttgaaggagctgcaggagatggacaaggatgacgagagtctaaccaagtacaagaaaacactgctgggagatgtccctgtggtagcaggtgtgtgcgtgtagggttgggtcagggcaaggcccccacggagacatgcaattgctgtcacccacagtcaggagcaaagggcttcctggttaggtggggtgaggcaccatctgtacctgctgcctaaggtcatggattgtataattatgttttctttggagcctgtgtgagagtcagaggtgaagcagacaaaaattacccacatggagcatgcggaacttcagactacaactgcannnnnnnnnnnnnnnnnnnnnnnnnnnnnnnnnnnnnnnnnnnnnnnnnnnnnnnnnnnnnnnnnnnnnnnnnnnnnnnnnnnnnnnnnnnnnnnnnnnnnnnnnnnnnnnnnnnnnnnnnnnnnnnnnnnnnnnnnnnnnnnnnnnnnnnnnnnnnnnnnnnnnnnnnnnnnnnnnnnnnnnnnnnnnnnnnnnnnnnnnnnnnnnnnnnnnnnnnnnnnnnnnnnnnnnnnnnnnnnnnnnnnnnnnnnnnnnnnnnnnnnnnnnnnnnnnnnnnnnnnnnnnnnnnnnnnnnnnnnnnnnnnnnnnnnnnnnnnnnnnnnnnnnnnnnnnnnnnnnnnnnnnnnnnnnnnnnnnnnnnnnnnnnnnnnnnnnnnnnnnnnnnnnnnnnnnnnnnnnnnnnnnnnnnnnnnnnnnnnnnnnnnnnnnnnnnnnnnnnnnnnnnnnnnnnnnnnnnnnnnnnnnnnnnnnnnnnnnnnnnnnnnnnnnnnnnnnnnnnnnnnnnnnnnnnnnnnnnnnnnnnnnnnnnnnnnnnnnnnnnnnnnnnnnnnnnnnnnnnnnnnnnnnnnnnnnnnnnnnnnnnnnnnnnnnnnnnnnnnnnnnnnnnnnnnnnnnnnnnnnnnnnnnnnnnnnnnnnnnnnnnnnnnnnnnnnnnnnnnnnnnnnnnnnnnnnnnnnnnnnnnnnnnnnnnnnnnnnnnnnnnnnnnnnnnnnnnnnnnnnnnnnnnnnnnnnnnnnnnnnnnnnnnnnnnnnnnnnnnnnnnnnnnnnnnnnnnnnnnnnnnnnnnnnnnnnnnnnnnnnnnnnnnnnnnnnnnnnnnnnnnnnnnnnnnnnnnnnnnnnnnnnnnnnnnnnnnnnnnnnnnnnnnnnnnnnnnnnnnnnnnnnnnnnnnnnnnnnnnnnnnnnnnnnnnnnnnnnnnnnnnnnnnnnnnnnnnnnnnnnnnnnnnnnnnnnnnnnnnnnnnnnnnnnnnnnnnnnnnnnnnnnnnnnnnnnnnnnnnnnnnnnnnnnnnnnnnnnnnnnnnnnnnnnnnnnnnnnnnnnnnnnnnnnnnnnnnnnnnnnnnnnnnnnnnnnnnnnnnnnnnnnnnnnnnnnnnnnnnnnnnnnnnnnnnnnnnnnnnnnnnnnnnnnnnnnnnnnnnnnnnnnnnnnnnnnncaaacacatgcgtgcacacacacatactcccatgcatgcactcacgagctcttctccacttaatgcccttctgtgtgctcatggtttcttttgaaccctgcagacccaacagttcccaatgtgactgttacccggcttagccttgtatgtgacagtgcaccaggacccatcaccatggaccttactggtaagtgaacacatctctactcttcagaggggtctaagatatcacagggaaaatttgatctttgtccccaattcccactggagaaaactaattaggtggctcttggagatgcatgcgctggtaccaggccacaaccattgcattcccagtgtccactgctttctgtatttaatgaaaaaacaacccagctcctgactcaatgtagtggaacaattgagagttggacaccttttgtgggtaagtgagtatttgtgcactattctgcttcgtgttcatatgaagagtacatgtgtgcatgcaagttaacctcgggatctgcttatcggatgggcttgctccccacggcgtgctcagcctgtttcctcaaagcaccaggaccactagcccaggggaaccattgtccatatgaactgggtcctcccgcagcaagcatcaatcaagacagggcacctcaggctctctcacgtgagctagtctgcctggctggtgagctccagggctccacctgtcccccttgctccagagctagcatgcacagctttatttaataagggggggatattatttatttatttatttatttatttatttatttatttatttatctcagaacatttttaatgtgggttcaggaaatactcgtgcttgcctggcaagcattttattgatcgcgcgatctcttcagccttcagttactcagttgtgcagtattgacttcagatctgtgcttccacgtggtaacagaagaaacagctattcttgtaggagacaatgcaggcggaaatgctgtacgtggctaaactcgcagtacttatatggtttgaacaccagcgaaagcgctgatcttatcccagctatggccttagcagaaggcgaggaaagcccagcacctcctgaataatgacagacactcccctgctccgcacacccaaagcttaaaactctattcctaaacaatttctctgacaaaaccccaaaataataattggtgtttatttcaccttttgtgactaacagccaactgctttcattaggcagatcttgagcagaaactgggaaggggggcttcatgggaaaataatcacctattgggggttaggaaaggggtcataaatccaaatcaggggcatccaaggtagatctgtcaccaaagtcaaagctttacagaagccagaggaaagcacgggtcgagagcagtaagtttagcagcagagcttcctctcacagggcgtgtgtgctttgccttatatggatatttctgtcaaggggaggaaatcagggcctgagaagacaggcttcctgttcaactgtaatcagtagagcagacacccggcaggcacatatgcatggccccgagctgcagcatcaccccagacagaaactcattctctcatccagactcaggcctcttcctgcactcggctgtgtcacgtggccaggtacaactgtcagtttgcaggagtaggtctggtgctgctgaggacatgcccagacaggacggaggaccaggcagaagagcttggtctctgtcctcctctctcagaagagaaaacctgcatttctgtcctaaagaaagtgctgagctaaagtcatataacagtgtttatgaagtcaaacactttccggaagtatacgcgtatacatacacatacatacgtatgtgcacacacatatacatgtatatgcacacatacacgactgagctatgcaggagtatttggaggaaagactaaagaaagcatcgtcatagcttccctaagcagggcctaagaattaatggcagatctcagggttatgaaccctaaagctgttacaattggaatgttcttcctttaaaaaaaaatgttgtaaacgcaagtctagtgagtccaaagtgagcacttacttaaatgattataaaaactaaaagttgcttttaaagctaggaaataccatatattatcaattgttaatatcaattttatgaattgatggagggaaattttcttgaagcctatcaattatttgaaagccaaaggctgatgcttttatatatctatatttttataattctttgaaagaaatcctcatgtctccatctagctatgtatatacatgaagtttttaatagaatattagctcaatttcttctaggctggttggttgattgacacttttttgttattgacaacaataaaatatagttatcttcctgagtactgattagaagttatgggggaaaaaagatttatcttcacaactatttattggaaaaaactatatttttggcatagacatcaaacttgtaggaaaaccctttactatgttactgttttgattttttaataactaatttgtaagatttgtaagccagtatagggggtgtgtgtgtgtctgtatgtctgtgtgtgtgtctgtgtgtatgtgtgtgtgtgtatgtgagagtgtatgtgtgtgtgtgtgtgtgtgtgtgtgtgtggttacactaatctcacactcttatgaatcacgtaacccaggtgggcggagcagaagatgccgaagcttggctttcattcttcacggggcctgggatagtaactttgtaactcctcttctacaggggatctcgaggccctcaaaaaggatacatttgtgctaaaggaaggcattgaatacagggtgaaaattaacttcaaagtaagtatctcccccacgggctcttatctttcctagaacccgtttcttgcatgttgtgctggtattctgttgacgtcactgttgttttggtggtggttgttgctgtcctttctccagcttggttctggattaagctgtgtctgcttctgagctcttcctgtggagatccacccctacttcccatctttacctagcagggacatcatcaccctttctcggaactcctgctgcttacatccacgaggcacacactgctgggtgtcctgccgagtcctccttccccaacctaagcacccagaggcaggctaaagttgtgtgcccctcccttccactgtttcacacgactttgtaaatgatggcaggtcttcatgggtatatggcaagaaatggacaaaacaaagactcaacaaatagaaaaaacaaaaacaaacaacaacaacaacaaaaaaaccaccaggattccccaactgctcaatgaccattcagatacaggaactgtgctcttaacaaagtggctaggaatctcagtggcatttgtggatcaggggaccagataatagcaaagttaaacaagacataagctcactgctcgtgaataaacatatgtgactaattacggatcccgggaaaacaaccttgactttgaaagcaaataagtgagagacgcactgttctgcatctcagggtttgtttgccttggctgttggtcatttccactcagtcatgttctccagggctccaccagggaagaccccatatgctctctctggtacacactgggctcatctttctactgggcgtaggatatgattcaaggtggttcgtcagccaccctctcccacgtactaaaatgcctaaagtctcttcattctggaaatatttgttgacaccaacacagccatcacttgaactgtggatggctttgcttcctgccatgctgtttactaccagagcaactggagtttaggggagagcctcacatttaaaatgcacagaaaaacttcacaccagtctagaacttacatttacactgctgtgctgtcagtttagaaaactcgtgtttacaaatgaaatccaaccagcagcttttgactgaatacgaagacgaacagagatctatgaatatgggtgactccagagatgcctgggtagcacatcagggtgcataggagcccctgagtcaaatccacttctgaagttggcgtcaggctccaccgaggttaagaccactctgtctgtacccaagtaaacctgaatcagtctctagcttgtcccggcttggagttacagttagaaggaaccctggtcacagtaaagaggaattaaagagctatttaaacctttactgacatctcttgacaaatgttcaaggatactacgtttataatagcaattgcctacgatcctccagcactctgtctctctcagggttcttcttatcctaaaattgacagcaccctagaaccctggacgagggtgattctgtgggtccccaccccctgtacgctgcctcttaagtgtgtgaagcatttctgacatccacagctctcaggttcattcatgtcatcaaaccttcttgctttgggagtgggggtggtgagatgtacagtagccatgtgtgtgtgtgtgtgtgtgtgtgtgtgtgtgttttctgccctaaatatgtttctattaagtgaatcactagtcacacagcagatgcctctttttaaaattcttgctattgctggattgtcttttcagctatgcagtcccactgggcccaagggtcaggctgaagggtcatataaagatgcattcatttcctcccattcccttggactagatgtaagagagggggtgataggaaatggggattcatttcatcaccatctctctgtaaggctgttttcattccagctgcttttggttgctttatcgcccatgctaacctaggtggtttagactctaaggtgacagtcttcactcttgggcaatttcaccatcggaagaatgaaggacaaccctggcggtttggtcttaactattgtacccactatgtgtacagacagctgtaattattcatggaggacattattgaagatgctttcgttcctctgcagttgaacgttccccgagtcctacagctatgagtcaatgtcctccttaacttgtttgtatagacatgaccacagtgaaaaactaacagacagcctacttctggcccaggtataatgagtcatggaaaacaaaatgctagactgtctgcagttccattccatctggtggattttcattgagcatctagggaaagtagcgacagctcagataacatccatggtgagagagtctggcagtgcgcactgggcaccagtggactccatccattattaataggaaagggtgttttggtgacccataaccttccctctaggctccagtctcgattacgcagcctctcctagctgactttccattaccacttcattcccttttgcttgtttatcataggctaggtggatcgtttctgaggatatggtgttcacagactgacatataattttccattggtattttcataaccttctctgaaatgggggccgtgttttcactaactagagattattgcccaagccaccaaagaaggagaaatatggtgaagaatactgagacactgttttcattaacaccgtccccaaacgcagttatatggacaaatattacaacagtcaaggatgtacctgcattggcagcattaagtcttgtgattgggtctcttcgatttcggtttagctagatgggaagggtaggaagtagtcaaacaaacaaacaaacaaacaaaacagaaaaaccagaaagagtctctaatctgaattgcttgtgggcttctcacctacaggtgaataaggatattgtgtctggcctgaagtatgttcaacacacataccggactggcatgagaggtaagagattggccgcaactacttctgtttgcttataaacttacaagagctggtataggtacaggtacaggtacaggtacaggtacaggtacaggtacaggtacaggtacaggtacaggtacaggtacaggtacaggtacaggtacaggaacaggtacaggtacaggtacaggtacaggtacaggtacaggtacaggtacaggtacaggtagatggcatgtctgctttagggaaagggagacaggcacatcagaccaagatgctgagaacatcattcagacaaggcaaactactggccttcaacattgggaatctggatttaaatttgttactcctatggagaaattaatcaagatgaattgaagacaaggtcaaaaatagtcatcaaaagtgaagaagtggaggaagaaatagcccttggtaaagtgcttgcaccaattcctgagactaaggccttggaatcaacagaagcaagccagcctggtggtatacatcccagcctggaaatgtggagacaagaggaccccagagcatcactgggtggctaacatagactaattggtgagttcagggccagtgaaaagggcctgtctcaaaaaaacaaaacaaacaataccaaggtggctagtgcctgggaagaacacctgaggccaacttctggcctgcacacatgcgtactatgtgcacacacacacacacatacaccagatattcaaaagtgagagcagttcacagtgtgaaaccacatcagaaaaacaagaactgggagccctgggattgtgtcctaggggtgagtatcaggagttccacgggagcgggaggagcagagaggtaatgtgttggggtgagcatcaggggtgcaacatggaggagaggcagagagacagtgctcttgtctcttaacaaagaaatgaggagccgggcagtggtggcacacgcctttaatcccagcacttgggaggcagaggcaggcggattttctgagttcgaggtcagcctgatctacaaagtgtgttccaggacagccagggctacacagagaaaccctgtctcaaaaaaaaaaaaaaaaaaaagaannnnnnnnnnnnnnnnnnnnnnnnnnnnnnnnnnnnnnnnnnnnnnnnnnnnnnnnnnnnnnnnnnnnnnnnnnnnnnnnnnnnnnnnnnnnnnnnnnnnnnnnnnnnnnnnnnnnnnnnnnnaaagaaagaaagaaagaaagaaagaaaaaagaaaagaggaacatctctctctaggcctgagaaaaagcagtgtaattgaagtatataactaaccgaatattctttctgatgtcattctggacgtaccttgggcaggaaggcaacccaaacaatcccacagtcctccctggccttcttactctctgtgccagatgcgggaacaatatgacagagcccagtccccaaagccacagaagagccaagggaagttatgatttgatgtgattgcaggacatgggaaccagtctatcaaattccagagacgattgggggcctgagacacactgttggccttgctagtgtctgctcaggtgaaaacccagctcagtttcctacttcctcccagcccagaggcagcgctgactcacgtcggcgagcagcccctggcatgtgtgcagctgtccctctaaagtgtgcagcagttagaagggtagctgtacccgcctcccagctctctgtgccatttaaaccccagctgttctgaattcacaccccagcgttcccctccctcgtaagtacagttggttgacctcatgtaccaaattctctgtttttttttaaacttttgaccaatttgctgatctcccctctcacctaacattcagattcctaaattctatatatcctgatccccagatgtcacagtgaccctctctctaactaagacattcatagaatgacattgaagtctgtaatatagagaaagaaagaacgccctgcaagctgccaatcttgaactgcttcaaacctggggtcagaatgtaggtctctcaacttgtttgcctacctgactgtcctctgtcagtttttaacggtgcaatctgctacatctctggaaagagatttcaggcccaccgacttaagtcacgccatactatggcttaataatcagaatcaactctgacacttttactgaaactccaccccccaagtatggggagtgaggggcaaaatgagtcacatttttcaaaggaatttggggtcttaaggatgctttagtatatctgtctggagggactgtttgggctctgagacaaggtctcctgtgtgtgcatgcagctcgacctggtcttaaacttgttcgtaccttagcttccctgatactacaaatggaattgtgcacacctggcttagttataaaaaggaaagaaacagagaaagaaagaaagagagagagagagagagagagagagagagagagagagatgttcggccaggcttggacactgttgcttcagcttctgcccatgtgagctgcgtaccaggctctcccatttttagtttcttttctgacaccagactctcacactaatagccctttctttcttcccagtggataaagccacattcatggttggcagctatgggccccgaccagaggagtacgaattcctcactccagtagaggaagctcccaagggcatgctggcccgaggcacttaccacaacaagtccttcttcacggatgacgacaaacaggaccacctcacctgggaatggaacctggccattaagaaggattggacagaatgagtgcgtctgtccgtccctcctgtcaccttcctcacccaccagaagagttctcccgaccatgttgatcatcacaaactccctcctccctccctgttcctagctaggccctttctctgtcacacacacacacacacacatttcatcaccaatatgttttatcttaccccatctctcagagtgttccctgcaaatgagacttaaaaccctggcttctcccaccttgagtcctgaaggtcaagaaatgggcaagctccggctgacgcctccttggccttctgttcagaagtttattcttgccactgggttcttccggttcgatgaaccccgttgtcttctctgccaaggggagctctccttttgtgggagacactgtaaacaacaccaaaggaaaagaataaaatcgttgtgtgtgtgactgagaacctcatttgctttcctttgcccttaaataaatatggtaccagaaagcccacattgtgagttgtcttatgcatgggcgtatggatgagagccatggtacaggggatatgtatgtctttgccaacgggttgtcacaatataatggtcagtgaatgttaataatacagaggatgaacattctaaatctcattgattgtgtaatattttcttagaatggcctcatctaagattgagatgaacaccccactgcctgtagaaacctcttcttagccttgactcgtgggtcaaatcgggctgtctcctgcttcgtgggctcccaacatctactgatgaagaagtggaagcgtcaacgctacttcattgtattacgtcacataaaggcctatcgcaagatggtctccacacggatcactctcttccttcccatgattctcagtgactaaagttctttcacattctgttttcacctctagatttttggctcttccccgttaaatcccttgtgattggttaatagtgatcatcagcttgacagactctagagccacctaggagaagagcccccgaggcctgcttgtgagggagtttctaaattaggttcatggaggtgggaagactcaccctacctatgggtggtgtccttccgtgccgggacatattacaatggagaaagcaggctgaacaccaccatccctcatcatcattcctaactgtgggtatagtgtgaccagtcgtctcgatctcctgcggggtgccttcctccctgccgggtgccttcctcgctgtgattgactgcaccttcaaactgggaaccaaaataaaccccaccttctttaggttgctctggtcacttaaaatattttctcacagcagggaaaagcaacacaagtccgttccacattttgatgcccagagcctattcgcccaggcctctgtctgtagcgacttcgaggcagacatcctccatcaaatcccacatggccctaagagttccccgtgtctctcacagcagcctatgaatttttctgtattttaccactctctgatacacgtttaaatcatggatttttgtgttcacctctcccatcaagaatgtaagctgagctgggcagtggtggtgcacacctttaatcccagcacttgggaggcagaggcaggcagatttctgagtttgaggacagcgtggtctacagagtgaattccaggacagccagggctacacagagaaaccctgtctcaaaaaaccaaaaccaaccaatcaaacaaacaaacaaaaacaaacgtaagctgagaggcactgggtcagctcacagccatatttacagactgcttaaatcaataagccgcatagagtacctacatatttttttttattatttaaatgaacggacccgacttccttctggctggatatgttccagagctcttccactgtgagccacttatcacagaaggtgaaagttcccccctggagtcagctgcaaggttcccagagctcttataacacacaaccacttcagttcaccagcctgtcctggattggcacccacactcaacatctacagtgggcaccagagaacaacaatgaaaatcaccaggtctcgatgcctaatcctttcgtttgtcctcgtgtgtgggctggttccagaggttacagcagatgtggaagaagccacgggtaaaagaaagaaaaatagaaaaagaaaaaggggtggggttggggcagtggtgtggccacagtgaagctgccatgaggagaagacagggacagggacgcgtaaaaataccatgcgtgctttcattccaaactagaaattttccagacgtttctgggttaagatgcatattgcccacacttcctctcctctcactgcagatggtctcagcactactcaggaacccatatggctcacagacgtcccagccaccgtggaactcatcgctgctgctgaagtggccgtcataggcttcttccaggtttgtgatacaccccacctgtatacccataattgggcatcttggctttaatgtagtcaatccaggggcctgttgggctagtgacatttgggagtgagagggcacacactctgctttcagatcatcatccaaggttcttttgtttcaaagctgtctgccctccacatgaggtctttctctcgcttgcttcagggtctctgagtctcgtggctgaatctccttacctgtggacactttgaaagaaagcaggtgtcggcaggaagtcagtcaaatctcatcgttgtcctaaatgccctaaactccctgagtctggacccatagaaccctgctcacaggcggaagtgaaagtagaggcacttttaaattttattcgtttattcattaatttattattcaagatagggtctcaaaactaaggccggcctagaacttgcagtgtagcctgtgcttctctcacatggacaatcctcctgcctcagcctcctgaatagtggtctaaaaggactatgccacacactcaggccaaaccaataaaacctggaaacacttttcacgggatgtgctaaaaaaaaatagggaggctctcactcgtctttctcgccttctccgaatactgaggaaggtgacaggataactgacagcttcctcattggctgtaggctaacacgtagacagtcacacacaagagggtctcatcccagcctttccctctcgctctgctaatagcagatggcaatcctcacagctaatccagccgttcttcagacattcctgtctacttccatcccttgattccaacccacagtcaccctgtccattccgtgtacacagctggaaatggctgagatggggtgccagcaggagtccggttttggtgctaagggactgagtttaagaaaggaaagagcaaagaatgagaagggtgtagtaacacaagagaccaccagatagagccatcgggtccttgagcaattcaattccaaagcccagattacaaaccagggagccctccaacaaatgtccacagtttctaagtgaatgccctcttccttttaaaagagcgagtctccagttctgtcttgtgatcccagactcaagagtagcaaccgtcccttctcctttcacatggcctttagctcagtgagatgcagggaatgtaagtttactcttgcctggagcttctgtggacagccgtcctgacacagcaaggactacagtgccagtcagtgcctgtgggaggagagaggccatcactaatgactggcctcccagcttcctaactgcagtcctggggtacaacaggtgcacaggccattaagtaccctcatgcgcaagcctgaaggatccctggaaggggaggacatgacctcagctcctgcacatctcctgaggaccatgctaagcccctgctcctttatgttacatcttcctgttcctccacaaattgttcccaaaacatttgcttctctgggtgcttgaatggctatatcatccatcttcacagacctctggacaccaaggcatccctcagctacaggtagaattcaggctgtactactagcccacacaattttgataattacctatattctcacagagcctgggacactcaaaagtgacactgcaagtatagcctgcatgtataaggataacgtctggcatgagcatatctttcttccctctatttctcttcacttgtttgctttgttttgtctttaggatttagaaataccgatcgtgtctgtgttccggagcatggcacgacagttccaagatgtatcgtttggaatcagcaaccattctgaggtcctgacccattacaatgtcaccagcagcagcatctgcctctttcgactggtaagccgggctggcagctccagccttcctctagttttcccttgtgagatgggaaagaactctttgtctttgacactaacgctggtgccaagttcagggacattgttgaccaggagagtgactcagttcaggctggcaaagcaggtggggatgcggcttgcagagaacaggaactgagagccaagatggggccgtaaaggtgctgcttggtcccttgccagagaaacggagcgggtcagctgcttagcgtgtattagcttcttatagctatagaataaaaggtctgaccatattatctccaaggtcatgttaaatagggaagtgcacacacatatacacacacatacacacacaccagggatggtgtgacagacagatagacagacagagacaaagacagagaccaggagttttatgatatatatcatacatacatgtgcatatatatacacatatataatgaggtttgatgtagctcaggatggctactcgattcatagatgaagattaccttaaacttctgatcctccacttcctaaatactgagattacaggtgtgccccacctacgcagcgcaggggaagcaaacccagggcttcctgtgctttaggtaatcgcaccatcaactgagctacatgcccggccccataattttatctgttcagatgctgagcatttgacttaagtttatcaaacattttattagacagctcttacgtggaaggagcttgtgataaaaacatattgaatattctgtctgctctcatagatcttacatcggagtgaaggttataatcaatatactaatacagaacaccacaataggtaaggtgttacgggagtggaaatagtgtgaaaatatagaaaaaaaaaaaaaacaatacaaaggggacagctaaactgggaagtgtatgttagagaactagggtactctaaagaaggaccatggccaaaggagaaaaactaaatgtacttaagaatcaatgatgccaacgtgaccccaaggcacggggtacagggaaaggcatagaagagagggagggtttattagaaccacatttgtgctaaaaccgcagtaccgccttagatttgcacttaacttgattggtatttggaagcacccaaagcctttggatcagtaaagcagcatggacaggagtgagctttagcaaggttattttggaaacaaagaataagatggattattaggaaaaagatatgcgaagtgagagaccttgctagctaagcaaaatggactttgtgacgcttagtgaaggtctgcagtggctggagagacagcccagaggctaagagtgctggacgtcttgcagagagcctgggtttcattcccagtagccacattgcatctctcaacttcagatccggatctgactgcatcttctggccttctcaaacatgaagcacacaggtgggtcacagactgacccgtaggcaaaatatccacccatatatacttaaatagacatagagtttatagtggagaagtagcaatagaagtaatagaaaaggtgctatgccaagctaggagattcagccctgtgagcccagcagtcaggagtctaaggcaagaggaccacaggttcaagcccccccacacacacacatacacacacacaaaagagctgagcaatcctgctggtagtgtaaactttgcttacaatgtatcctttataaagccctgttggtggctcttttgggctctgcccccttccttagcatctggtttatgtcgaccactagtgacagccctactttgagtgaagtcttggaactttggtggacaaaatttatgtgccatgccagaaaataaacaggctggttttgtgccacctccttggcagtgcttggaaaggctggaaaggccaaccgttacataaacacatttctcagtttacatttccaaaggttggctacatatgttaataagattatccttcaggagttcagagtaactgtaacaaagggaaacctggaccattttattttacattggggaacagaagcctatggcaaactttctgggaaaggctttcaacttagatccacattttatcattttcagttttccacagtttgcttattttttttctgcagtttggtgtgtgtgtgtgtgtgtatgtgtgtgttcgtgcttgtgtgtttgtctgtctgtccatctgcctatctgtgtgtatactatgtgtgtgtgtgtgtctaatctatgatagccattattatagttctcacaaaatatgaagagagactatgagccatggattttcaatactgaataagcttcaggtagattgaagcaactcgccagagtttcacaaccgtcaggtagcgcctgactccgtactccgcgtcccctgtctactgcattacagcggctctctagagcactcaaggacagtcctcttaaagctctggtaatgatttgtttacgtttacacatgtgtctctgtgtgtccgtgtctctgtatgttcttttgagtgctgcaaaggccggaagacagtgtcagacccgctggagctgtagttacaggcagctgtgaaccatctgaagtgggtactgagacctgaattcagatcttctacaggggttccaagcacccttaaccactgaaccatttctctagccccagaagaaaatctctatttttacactaggctgtatttatttaatgttccttactctgaagtctcggtttcaaaactttatcccaaaccatttccctaaacccctggtattgatatatcaagtccaggggttatatatcagaatctaatttagatattatatagtgtggtagcaaattttcagaatttagggttactggactcacaagagtacgaatatttgtaaagataagaggaaataatggttgagtaaaagaacactggctcattgtgattgggcctgcaaaagccgtgtgtgtgaaaccacaactttctatttagttgggctttctattgtgtggtgaagcactatgaccaaaagtaacttgggaaagggtttgcatcaccttcgacttttatattacagtacatcagttggggtaggctcgaggcaggaacctagaggcaggaaccggatcagaagccatggacggtgctgtttaatggattactttccatgcttgcttgctcactttgctttcttatacaactcaggaccaccaccctgaaagaggaaacacccacagtggtctaggccttcccacatcaactattaatcaagaaactgcctgacaatcttgcctatacgctggccttaaggagccatctgtccaaacaactctagcttgtgtcaagttggcaaaaaatgagccagtaaaactgactccttgtcaactagacacataaatgtatcactcttggggttattgttcatctcccaaatatcatatcaatgttaacattacaaaataaaacataaataacttttaaagtcccacagcctttaaaatttcaaacacttcaagagtgcaggctctttaaaatatccaaagcctctttaaaagttcaaagtctaaaataaccaaagtccttctaatactccaaagttctgtggaagaaataatatttaaaagttaaacattttcttattccaagaggtgagaaccagggcacagccctaatcaaatcgaagcaaaaaaccttcaacattgtcagtaactcattgcccagtgtctggcactcagtcttctgggctccagagggcctggcaagcattcactgtggctctgtcatttaagtatccgtccctgtcatagcacgcatggctcgcccaggagactcatattgtctcgtaatacttgctggtcatcacccagttttggcatcgaaaatatgctggggtctccactgcagctgagactgaatcttcaccatggcctttccatggactctcttcagggactttaactttgtcacttttcaccaaggttcaacagcactgcatgaccctttcatgctgccaaaatcagtaacacgaggcagactcatacatcatggggtctggctgccagcataagatgcagcctgggcccctcttaaccacagcttctgtgtgataaccctgagggagtagtcccagaggatttcacctcagtgatgccggtcccttcttgacagcagctgactctctagccccagttggccagaagtctgtagtcttgatttaaaatatcacatgaagcactctcagacttgcctcaaaacttcgcaagtcgggcctccaacatttccattgctctcagcattctctcccaaacttcccacagaatagagggctctgaacactcaatggcttttgtatccccaaattccccaaatccttcacaatccccccatagcaacagcatcgtatccgccacagaagtcgtctatgctggtactgatttctgtcacagagtttctgtgagtggaggagaatgttgacttggttgaatgtgacgactgttcattactgacggaagcccaggcaggaactcaaagcaggaacttgaaacagagatcagatagaaccagccagtaagcagtactcctccacagtcttcgattcacttccttggcttccctccatgatagactgtgacctgtgaccagagaagccctctcctcatctctcaaactgctttggccacggttttcagcacagcaatcgaagagaaagtaggaaaggaacctactctccaaaactagtgcagactgactcttataaaggttccccgaaagccctaagcaaaagtcaaggaacagtaagaagttgcaggtgacagtgtggctgtcagggacccagcctgtgggtgtggcagcatggagaccctctgcgtttccacacggtcccacagagatgtaatcctcacagagatccaactcctggagtcagtggaccgtgaccctgccctgctatttgaatgtctgcactacttcaggttttcttattcacttctattttaagaaataaagttagcccaactctgacccagggagatatgagagacagagtatcattcttgacctccatacagtgacttttgagtagttggcataagagatgcaccataccagatgagtcagaagaaatgactatgtaaaagagggaagtaatatgaatcaagtgattacacttttataaagtatgtgtttagctggtcatggtggtgcatacgtgtgatcccatacctggagacttacaggaggacccaagagttggaggtcatcctgggctacacaacaagtttaaagccatcctgggctacaggagacacaaacaaacaaaagtatatatctacaagtacatggcagctgagcaaagtgtgttcatgcatgtgcgtgtgtgtgtgtatgtgtgtgtatgtgtgtgtgtgtgtgtgatcagagatgtgaggcaaacgctcaagtcacttttcagccctacccaagttactttatgactcaatgactcaattgtcataaaatattgtagcgcagtataaaggaagatacacagggcatggtggggtgagcctgtaattccagtaactgggaggcggaacgggaaggggttggagctcagattcgtcttggctgcattggaaactaatacccaacctcatttcatgaaaccctgtctgaaataaatttttaaaaattaaaaagaaagactataaataaactaagatgagttttaatgcattttctggaaagctagatggtcagagagctctctggaacgcaaaggaagaccccctcctagcaaagcgctgggcactaaaccaacagtcctgagctcaaagcccttccagctgttctcttctgctgtgggcatctctgtccttggggaggatagcttaagtaaaactctttccaaaccctggcaaaatagatgtttaaaacgtcccccaaagccttatgctaggatagagctttctctgcagtgcgttatgcaaacgattcccttggcagaaagcatgcttcctgttcaagtactgcctccaggaaccctacacacgaaccctcctgggtttattagtttaggaaataatgaaataatcaggtacactttgttggaagaaccccagtaatcggagagcctgcaggggagggggcggcttcttgaaggtcccttgctgcccagggaagaaactttatttttgctgcacatgctctgtcccttctctgcattcccttgttcagaaacacctggagttcctggcgcctccagttcaccagttct

SEQ ID NO: 536 - DNA, 1180 bp, Mus musculus
caacttccttcctgttctgccagtcctcagtcagagttgagagacagaggtaacctccagagacacagggccgactggagcctggaatagagcaatcaagatgacggagaaggatgcacagccacagctggaagaggcggacgacgacctggacagcaagctcaattataagccaccccctcagaagtccttgaaggagctgcaggagatggacaaggatgacgagagtctaaccaagtacaagaaaacactgctgggagatgtccctgtggtagcagacccaacagttcccaatgtgactgttacccggcttagccttgtatgtgacagtgcaccaggacccatcaccatggaccttactggggatctcgaggccctcaaaaaggatacatttgtgctaaaggaaggcattgaatacagggtgaaaattaacttcaaagtgaataaggatattgtgtctggcctgaagtatgttcaacacacataccggactggcatgagagtggataaagccacattcatggttggcagctatgggccccgaccagaggagtacgaattcctcactccagtagaggaagctcccaagggcatgctggcccgaggcacttaccacaacaagtccttcttcacggatgacgacaaacaggaccacctcacctgggaatggaacctggccattaagaaggattggacagaatgagtgcgtctgtccgtccctcctgtcaccttcctcacccaccagaagagttctcccgaccatgttgatcatcacaaactccctcctccctccctgttcctagctaggccctttctctgtcacacacacacacacacacatttcatcaccaatatgttttatcttaccccatctctcagagtgttccctgcaaatgagacttaaaaccctggcttctcccaccttgagtcctgaaggtcaagaaatgggcaagctccggctgacgcctccttggccttctgttcagaagtttattcttgccactgggttcttccggttcgatgaaccccgttgtcttctctgccaaggggagctctccttttgtgggagacactgtaaacaacaccaaaggaaaagaataaaatcgttgtgtgtgtgactgagaacctcatttgctttcctttgcccttaaataaatatggtaccagaaagcccacattg

SEQ ID NO: 537 - protein, 216 aa, Mus musculus
ETEVTSRDTGPTGAWNRAIKMTEKDAQPQLEEADDDLDSKLNYKPPPQKSLKELQEMDKDDESLTKYKKTLLGDVPVVADPTVPNVTVTRLSLVCDSAPGPITMDLTGDLEALKKDTFVLKEGIEYRVKINFKVNKDIVSGLKYVQHYTGMRVDKATFMVGSYGPRPEEYEFLTPVEEAPKGMLRTYHNKSFFTDDDKQDHLTWEWNLAIKKDWTE

SEQ ID NO: 538 - DNA, 39983 bp, Homo sapiens
ttttcttgatgaaagaatacaaattttaaggacagtggaaagtgccaaaagctgagtgaatgttctagaatgttgttactcaaagtgcagcagcagcaacaccatctgtgcacttgttaaaaatgcaggatttcagccctgctccatacttaccgaatcagaatctgctttttaacaaggtccaaggtgatgcgtttgcatattaatgtttgaaaagtactgttctagacccatatgcaagcttgggtttaccacttatctgctatatgtcacctctctgagtctcagtttcctcatatgtaaaatgaatgatttagagtgttggggttctcaatttttttccatcccagtacacttgagaaagataatcttgcaattctcagattctcaatttttgaatatgggggtggttgtgccataagtcttcttcctccaaaggaaatccaggagagagaagagggagagattaggagtgtggagaaagtctaggtgtatagtttgaaaaattctcctaaagccactctaatatggttctcaggggtttagaattagaaaattcttaaattactctacagtcttaaaaatctatgttccttcttgttttggaccaagtaaagtagacacatttcctctcatgcctcttgctaagtacagctaaaaatcctggatactatatatgacagaaatatggaatatttcaaaatatttgagagaagaaaaaccaaagacaggctttagatgcaaggaacaatatggcaggaagtttcctgaattttctttttgtatatccggatgttgatgcaggaaaagacagtaacccaaaaacaccaagaggagtgaaaaaacaaaaaacctccccaaaagcctgttttttctagacaagtgaccaagagagtagcaaactagcaagaacaaaaacatttaaacaaaaaccgccctactccagtcaaataccatggaaaaaaacatgacatgactcagcaaagtctgagtggagagccaagactttcatcttgattcagctacaacggggtgaccttctttctcccaccctagctgagtagcatcagagaaagccacattgggatcttggactttcacctccaaccagtcataacgaggccaccttcttctccctaccagagtggtatcaaagaagcccaagtgggaaatttcatctccattcagaaataacacagcatgtaaaaaagcatgaaataaagattttagaactgaaaaatagaataaccaacataaaaaacttaatggataggctcaaaaacagaatggagaataaagaagaaagaatcagtgaacttgaagacagaaaaatagaaattacccaatctgaacaaaagacagaaaataaacccacccccccacaaaaaaaatgaatagaaccttacagatctgtgagactaaaggacctaatatttatgtcatcagcatctcagaaggaaaggagaaaagagatgaagcttaaaaagtacttgaagaaataatggctaaaaatgttccaaatgtagtgcaggacgtaattgtataacatcaagaaggtgggaaaacccagtgggataaactcaaagaaatctacaccaaaatacaccatggctaaacttcagaaaactaaagacaaagaaaaaaagtagaaagcagtgaaagagaagcaacaccttatctgtaagaaaaataactcaactgacagcagatttcccattagaaaccagggggactagaaggatatggcacatttttcatgtcctgagaaaaagaactgtcaaccctcacttctatgtcatgtgaatttatccttcttcggaataaggggaaataatgacatcctcaaacaaaggaagactaagagaatctataatcagaagacctactctaaaaagatggctaaggaaactttttgaaacaaaaaataaatgataaaagaaagaattttagtctatctgaaaagaaaaatggaagataagaaactcaaccaccttcagcaaggcttggtggagaacgaaacatcgttcaaggcactatgaggttctaagggtctggtcatcatcttggatcaaggattcacccactgttccctgtttgaagtggctgctcttcctgtctctgctactctgactcctactgactctcaggggattggtgtaggctgggcaagcaacaatcaatacacatcacctctgttggatggagtagttttaccagatcccttcatagttcattgcctagtctagtgatggctgatttctggtcagtttgtctctcatcttatcaaccaggtaatcgggctatatggctataagcaaaatgaccaatctcaaaggaattcctccaaaataactttggcgtattgaacactctaagctttcacagaaacaagaaataaagctaatgggaacctcgctattgatacattcaataacataaataaatcacagaaacattttgctaaatgaaaaaatccacagtcaaaaggcagtgtactgtttgacttcatttttgacattctggcaaggcaaaactgtaggattggagaatagatcactgggtgcttgggaccgtgattgagtggagaagttgactccaaagagaaaatccaagaaattttaggagcggtgatggaattatttggaatcctgatcatagtggtagatatacaactcgatgcatttgtcaaaacccatatgtccatcacaaggagtaagctctactgtatgcaaattttatgactaaatataataaaattattttcttaaatctgtattccatagctctataacttttggttcttgatcccttctgacagatggaaaagtgttattaattatatattggaaagtagagtgcaggtactaagtaattagaaagtaattaaaaatttagctgtcctttagctgcttatgcaagcgctaatctctaatctttctttagtgcttcttaaaataccagtgagtgggaagacacattaaagtcacatttcctccacatttggaatctcctagactgaactttccactctgactaatgcatagtggactccagaggggaacacactaaacgtgaaaaaggaatgtacaagcctggcccctctttccctaaataccctacgtttgattctccagaacaacattaatcttggaaaaaaacttatgaattaaaaacacaatattcttttccagaaaacagataagaggaaacacttcccaactcatttcgtgaggcctattttatcctgacaccaaaaccacacaaagaaatttaaaaaggaaattacagaccagtatctctcataaatttagatgcaaaaattcttaacaaaatattatcaaattaaatacagcaatgtataaaaagaataatacactacagtcaagtgggatttattccagcttgcaaggcttattaaatattcaaaaattaatcaacataatccattatattaacaagctaaaaaagaaaatcatatgatcacatcaattgatgaaaatatgattaacaaaatccaaaacccattaatgataaaaactctcagcaaactaggaatagaactaggaattctactagaataggattctcataaagaagctatgaaaacctacacatcagtgaaacagagtagaaaactcagatatagacctacacaaatatgcccaattaatttttgaccaaagagacaaaagcaattcaatgggagagggatggtctgttcaacaagtggtgctggaaagcatggacactttgtctatgggtatccataaaccaagaggagaaggagaaagagaaggaggagaaggaagaggagagaaagaatcttaaacctcacatattatgcaccccaaaaacctcacacctagtacggaaattaactcaaatgaatcacagactaaaatataacatgtaaaactatgaaactttaatttaaaaatatgagagaaaatctccaggcccttggactaagtgaaaagttcttacacttgccagtgaaaacacaatccataacagtaaaaatggataaatttgacctcattaaaattaaaaatatttgctctgtgagaaactctgatgggggaattgaaagacaaattacaaattggaagatggtatttgaaaatcctatacccaacaagggatttgtacctcaaaaatgtaaagaactctcaaaacttgagattaaaaaggcaaccaattcaattagaaaatgaacaagaaatacgtgtaaacatttcactgacgaggatatgtagattacaagcacacaaaaatatattcaccataatcatccattagggaaatgcaaattaaaaccacaatgagaaatcaccacacacctatgataatgattaaaaaaaaacatagtgtaacactaaatgattgcacagatataggagaagctggatcacttgtgcattgtgagtgggagtgtaaaatggaacagccactgtggaaaaccatttggccagttttcctaaaaataaacatggatttaccatgcaacctagcaattgcacttttgggtgttcatccagtgaagtgaaaacttgtgtccacaagtgtttatagcagctttattcatactagccccaaactggaaactatccaaatttcctataatgagtgaatagttacacaaactgtggtacttttataccatgaaaatactgctcagccgtaaaaggaaatgaagttattgatacctacaacaactggtatgaacctcaaggaaattatgctaaaggaaaaaagccaattacaaatgtacgtatgattccgtttacataatattctttttaaaattttttattttaagttcaggggtacgtgtgcaggtttgttacataggtagacgggggtttgttgtacacattatttcatcacccaggtataaagcctaatatccatgagtaatttttcctgatcttctccctcttcccaccctccattctccaataggcctcagtgcgtgttgtttccctctgtgcatccatgtgttctcatcactgagctcccacttataagtgagaatatacagtatttggttttctgtttctgcattagtttgctaaggataagggcctccagctccatctatgtccctgcaaaggacatgatctccttttttaaggcttttttatgttctttgttatggcttcatagtattccatggtgtatatgtaccacattttgtttatctagtctatcatccatttatttaatatttttaaaattaaaaaatttatagagagggtgaacaatttagtggtcaccaggtgttagggatgggtgtgaggaggtgggtgtggctacagaagggtagaacaagtaagcctcacagagatggcagagttctgtatcttcattgtggtggtagttagaagaagcttcacatgcaataaaattgcatagaattacacacacacacacagacacacacacacacacacacacgagtgcatatgtaactggagaaataggagcaggctctgtgaattgtatcaatgtcagtttcctgggttgatattatacatatttatgcaagatggtgacattggcggagagagagtgaacatttcaattttctgtaaacctataagtatttcaaagtgtaaatttaaataaatttgttattcaaaaattcataagaaggatgcatagcaacttcaacatagtggcaatcagataaatatttcttcaaagctgcaatataggtgacttgactcagcaggcagagctgtttccccttttcctgtactcccctctcaagccattcctccttttcttcctttgtaggcatctctcacttcatcttttctaaatactgaggtttcctagtatgtgggcctttctcattaattctgctggtatttattgacagtatactatgttttcagtcagtgctctagtctctgggatacagcagtgaataagacaaggtccctgaccttatagagctcacagtcttgtggagacgtggataacaaacagaaaaaataatacatgggaaatatgtcaagggatgttacatgctagaaataaagcaaaatgatgaaatagaggcactattttaaatataatggttaaaaaagacctctctgagaaattgacatatgagcagagatctgaataaagaaagaaatgaatcaggtatgattatttaaaggaagaacatttctgcaaagagaatgatccctaaaatgggaacctgtttctcattaaaagattagcaagaggggcatgatctggaatggaggaaacaagggctaagcgttaccagatgagtctggaggatctagcaagtggctagatcatgagtatgttagaattatagtgctacatgacaaattaccccaaaatttagtagcccataacaatagatatttcttatctcccacagtttctatgggtcaatcaggagcggcatagctgggtggttcctgctcacatcttccatgaggttacagtcatgctgtcagccagagctgtcatcatctggagctgaaaccttcatttccaggatggtccactcagacagcttttggtcctcaccacatggaccactccacagggggcttgagtgtccttatgacatggtgccctgcttcccacagaatgaatgatctaagagaaatcaagagaaaagacacaatgtctaacaaccttggaagcgacatgccatcatttctgccatattctattggccacacagaacaatcttgatacaatgtgatcagggttgaataccagaatcactggaggctgtcttggaagatggctactacaataagccaatttgcagatataggtgaaaatagaattctattttattttaagtggatgaaagatccctagaggtctgaaaacgaaggaaagatgtgattatgagtatgctttttagtctgttatgagaataaaggttaaatcagactattatggaaatagaaaacatataaagagaatgctatgaaagtccagcagaggcacaatgatggtaggctagggtgctaaacaaggaggaggtaagaagctgtcagcaggttattcaccgaaagtggagctaacaggattgccccatgcttggccaacttctctttctccattccttctgggtgaatccatccacttacatagtttaaaccagtgtttctaaaacctcaaagtttacctgcagagctttttaaaacatagatttccaggtccaacctccgggagagattctgatgtaggaggtttggcctgagactttgcatttatttctaaggagttcctgggtgatggtagtctgctggtacacaggccacactttgggtgtcctggtttaaattactatccatagtctgatgatatgtaaattcaggcttatatatttcactatctttcagaaatcatctccaacaaacgacaccattttttttcaaactcaggactagacacgtccaaacgtatgtccttatttctcctaatacatctatttcttcttttgtattctctatctcacttgggggtacccccaaggacccaatcattctagcaaaaaaatccagaagtcattcctgattccacagtcctcctcatcctcatccttcacatcccaccaattaccagggcatgccaatttcacctaaatatttctcaaatctgaccatttctgtctatctcattatgagtgttcaagcctaaacagtctcctaatagattttattcacatcaaatccaaccacatcagtttgccagagtaaactaagtgaaatgcaaaacaatcatgtccatcctttactttcaacagttccccatcactgataggatctaggccgagttcgttattaacatggcataagaggtccgtggtgatctgaacactgtgcctgccctgctctaggtatatttctcattcacatgtaacttccactttacattccaacaatcttgagctgcttgcttataataccctgcatatcccacatcattttgggaggccagggccgtgttgctgctcatgtttctcctctacctcgagtgccttctctttcactcccaacccttcgctcatcaactactcaaaacctactctccctcttaactgagcgcagtggtcacttcctccaaaaagccttccttgatgtccttacatgtactctcaaaacacaccatgtattttttcttttcctatgctgacaaaaaaaaaattaaatttgtctgcttctgtcttccccattacatcttttagctacttgaggtctaggactgtgtcttgtttatttctgtacctttccatgggtccttgcatatgaccaggaattaagtatattttgataattggagtccttttagaactttctaaaattatgaatgctctctcatcccccaataaatacattaatctataatacaaatctgtaaaatatgtattgattttacagatttttctgggaaggggtgctcccataccctccgatatacactgggctctggagggaaaaaaaaagccaggtttgcctagtgaggtgttccctaataacatgagaaatgagtggtggaatagagaccatgcatttaccatttttcatttttaaatatttcttgttacaattaatgtattctgcctgtgttattttaattgtctcctaggtacaacataagttccacagggcagcagagatgtcgcctgcggtctattgctgcacaagggaactagaacagtacttgaaagaaaagaggtgctcgataaatgttatggaatgaataaatgtatcccctcttgagggtgcagagctatagaatgtgtaagttactgccttctgtgtaaattagggtttgctttgtttttacaataaagttatgtacattgtttcaagggctgtattctgtctatgctattttaaaatttatagaataaagtggtattaggcttttagtatttttgctcattttaattatatactattttccttttcatatttttctaggctaatctcttctcacgtgaaatgactcccttgattattccgatttcattgactctaagtagaaggcaaaccctgtggtatcaatttacaaagggaaatgaagaagatgcagtacatttaggtgaaaacaaaataaacgtcagtttctccaaatttgtgtgcttagtcagatctaaatatattgatgtagtgtaaatactgaatattgaaatattaacctaaataagcatttattattggtaacagctacgggaatatacagcatgaatgtgacttggctgcttaaaaactgttcctcagatggtttaaacatggcctccgagacttgttcccatttaaattacttcataaaccatttcctcaaatatggtacaaagtctattttggcacttgttaagttgtcacaaattctgagttggaagactatgaattaatgaagttttacttccttttgtaatttctttcctaggtttcatcaaagacagtactttcgcttgcttgtttgtttcatttgaagaaaaatcagccaaaactattacaaacaatatttgactgtttgtagtgcaatacaaagctacgtcttgaaattataaccaacaaaactccaaaaatctgtttaaggacacatttttaaatttaggaccgtagtatatgcagttaacaatcatcatttcttagcactctacattcactgccagcaaactttcaacgtatctggttgataatgaagctggcggggacccagtgggaacagaagtgagtggtacaaagtaaagccgatgtgaatttattgctactggtttcaggctccttacctccataggcttatgcactgcaatgacctgattatcagaaataccctcacaattattcataatacccatagctataggctccacactcttgcgtgtacattcatgcatctccacgtcacacgggctgtcatgctcgcacatgtgccattaattgacaagaatgctgctcaagttggctgatcaagagataggcagtgcaaaggaacaggatttgagacagcccagggtttcctcttcaagtaggtctaaaacatttttttttctcattgacttccttcctgttctaactgccagtactcagaagtcagagttgagagacagaggcaccccggacagagacgtgaagcactgaatgtaagttcaaatacctcgggctggggaggcttcaggtgggcacagagcaaagtcggaaacctctagacggggctaccgccctcgacagtttattatttttttagaggggcagttcttctttaaaacaaactttatgataagaaattgctaaggaggctgcagagaaggggaagttagaggagggaagggtagcagtgactcaggggaggaggcttaaaaaaggagggtacagggtgcgctgcagcccaggaagtgcaatcctgaatattctcagaagggctctgagaacacgcaccgggagtgcctggaggggtttcctgcaaagtaggagcaggcacctggccaggcttggaagaaaaagactgtagatccaaaatgatacggtctgtgctggtggatggtgggttgtgctggggtggagatatgtggtttcctgtttttaagcagacaatgtaaaaagactggttgaaagagaaaaaaaaatggttcaaagccgtcaaatattaaactgtcttccactaaataattttctggtgatataagagaaatgcataatgaaatcctcccttagagtgcaggggctttatccctcaaagaggaagtatggtatagcacattgttatgtactcatgagtcatacagtgatagaatttctaccactgacaaaggctgtgtattaaattcctgcagtcggatgggcagatctttgctgttgttgtcaaaaataataatagggctgggcgtggtggctcacgcctgcaatcccagcactttgggaggccgaggcgggtagatcacctgaggtcaggagttcaagaccggcttgaccaacatggtgaaaccccatctctactgaaaatacaaaattagctgggtgtggtggtgcatccctgtaatcccagttatttgggaggctgaggcaggagaatcacttgaacccaggaggcaggggttgcagtgagccaagatcacgccattgcactccagcatgggcaacaagagcgaaactctggctcaaaaaataaaaatattaataatgataatagccctttaggtatgagataactaacagcaaacatggaaaacaccaaataacgtattaagagacaggtttgagaaaaattcaagggggcccagctaggacagctgatcagtgggccttcaaaatgtcaaggtctgaatttcagccaccattaggagaagtgctttaggtatgacctgaaatactttcttcccttttagaggacttcccagccagcatgtttcataaacataatctgtaattaaactctagacctatggtaacttgaggtgtgtgtctggcaagccctgggcagttcttcattcagagtggggaaaggcagactgctctcacccggagggctcatggtcaccacttcacatggagacctagagcccctggagtcagggttggcctggccatcttcactgcagggatggtcaggcacaggagatcaagaggaccatggcacctgttggtccggagagacagggggcagaggtccagtccctagcaggcatcgtgaatcttgccattggctttgtgtttttttaatttgtaagaatatattccctcccaaagcagatatagcacaagcttagtaacaagagcatcttactcttttgtgagatgtgtgaaattctaagagacagttctttctccatccatgcttcacagatgcaaaacctgaggactaactatgctgtcactgaacagaaactggcaagcatttttcaggcctcgactggaatttggtccttccttgctttggagagcatgagtttgtcccctagggaagttagctctgagcaacattaaggttctgttttcagtagacactcagcaccacaaagtcattctgagggaaagatacgggtctgagctgatttgggagagcacagtacatgacaaacatcagctagcaggaaaagagaagccctggggagtcgaaattatgcagatagaaaaggagaaccaacattcattgagtgccttctatgtgtcaggcctggtgataaaaactttcaaattttgttcctgagaagaatgcagaagtgttcaataatttgactaaaattacatactgatacaaaaaggatcaatagccacaatgcctctgaattgcaattcacagggcatggtggtgcgtgcctgtggtcctacctactcaggaggctcacgtgatcctcccgcctcaacctcccgagtagctgggactataggcgcgcatcaccacgctggctaattttaccatttttagtagagacggggtttctccatgttgccagggctggtcttgaattcctgggctcaagcaatccgcctgccttggcctcccaaagtcctgggattaaaggcgtgagccaccatgcatggcctattattatttttttgagacaagtctcactctgtcacccgagctgaagtgcaggggcgtgaacgcagctcactgcagcctcgacctcctgaggctcaggtgatctcccacattctttaggaagaatcacatggaagaaattttctccaattccatattttgagagttcttattcctggtttgtgttattgctgcccgggatcctgtattcaaggctacactggcatacccagagatgagtctcatgttgcccctgaaacgtcagcaacatttatctgtgcaataagcacatcctgaatcatcctgtgttgtgttactctctggtgtccacagccaaagagtgaattttaccgctggtaaaaattcacttgggctttcttaaagagcctaataatcttagcacaaacggtcataaaaaaaattctctctcaattctgtctaacttttcatgctaatttaaaacttttgtgaatatattgagatactgaaggcaatggcttccttaatgcacagttttctttgagaattatttaaaataatatttgtgaaggtacttggtggcatgacttcacacgttgggcactcagcaaagctcacgggatctctttgagttctctctctttgtgcatatgaatgtgggttagaaaaacacactaaaaaatgcacaggcaagaaataataaattgtttctctcacaaagacaaatggtaagaaattacgtttctagtaatttgtgcccttctctggattgattacaatatttattgtctcttacaaaataatcttgtctttggtttttctcatccagttttgaagttttcgtagtccttcatggggctgaggtggtagaaagcagcaccgcaaagtggggagtatggattcctccatgtcaccagggacaggggcggtggggagagggtggaatcccgaaccaagaaggcttctggtgtcctgagagacaaatttgcaatcccgtaatacaccaaattgccaggcaagcagcacagcacattcaaatccttgactagctctgaaatgtcaacagtgttttagagatggcctgactctccagacctgcactagacccacagcccgatttgggggaagtcagacatatcctagtcagcagggaaagtggaggtagcaggagttacagagaatgctgatgctcacataggaacttctctgatagaaatcccctacttctggtatttccacttttctctctctcttccctctctctctttctcccttctccctcctctctctctcctctttctcctctttctctctccctctttcccctcttccttctctctctctcatcgctatctcttctacctaatacattaatatccatggcctgtgtgtctagatgcataatccagcacaattttgcagatccagctttgggccgtgagttaagtctctgtggtattttgctccagagccagagggaattctcttcattagctgtgcctgtgttcactgacatttctcatcattcgcagagtgacctctggcttcaatgaagacagggagcaataaataaaacctaaaattaaattgtttacatgaaagtttttaaaagaaatataatatagtctcattttaaggttgattcagtttttaaacaatcctttcaattccccagaacttcttatctctttaatactcctcaaagacaaaaatctatttttaaggaggaaggagtggggacatagctcccatccaggggaaagtatttggtgtggaaacagttacctagcttcagtgaagctttgcaacaaagcagaccacactggggcagggaaggaagaagaggaagggaacaaatattcacggaacatctattcttgaccagtatagtcctataatttttcatgtgttttctccaatctttcaaccccgtaaaaaagaatatccccattttagtggtgataaaactgaggctcagtgaaattagcaacttgattgagtcctgtcataatgcagagcctggttttgaatccctggtccatctgactcaatctatgttctatgagacatgaaagtcacctttctctgaattacccaggtaatttgtttaatctaaactcaggagttctaccttttcttgtcctcagttcatttagagctgcattaatgaaacagatgatgctctatcctgacatgggtgtaaatttttaagtgtaattcactttcaaagtcttggaaatttcactgaatttgcaagcaaaaacattgatgtgtgctatgtcatatgcatgctgtgagtaaccatcctaatttaattcgacattttaattgagcctgagaagattaagtccccatctcagcacatctaatgcttgccagtgctttgctgagtagcaaacatgaggatgtgaggcctccaatgtgaaagttaatctgtatgcgcatctgtgaagcagaaaatacagaaaactagagtagcaagcctgtgtgaaaaaatgatatgtgctttggggcctaataaatggggtccgcattaacctggttaaacatataactgttcattctccatttcatttttcctgtgcaaaggaccaaagtcaaaaataagcaaaactcagctctgccctttgtagaataggggatgagcagctgaggaaggtgaggaaagcccatccagaagattctatgctgatgggctgagtcctccccaatctcccttttacttcctcttttcttttctcatttcacaagcttctttaaattagggagcatttgagtcattaaattaagaaggggcctcagagatcctctcatgccacggcttctttttgcagaggatgaaactggggcccagtgaggttaagcaacttgcaggaggtaacgcaggaaccgagttgcgctgaaacatcgttatctgacacttccctgctttgttaaagctgtctctgcagagcttgcaaagaagcatttacctctgcttgtgcacctccaggtagattcccaagatgactaacaaactctaattttattataacttcttaaagatgactgaagcaataaagcatagtgcctaaaagtcagacaacctgggcgcagacattaattctgcctaccacgtggtatgtcttcttaggcaagttacttaacgtgaactttagtttcctggtctggaaaagagaatgatgatgccaacaaagttactgtaagaactaaatgagataatcctctagaaagcacttagcactacatgtgataactattataatttgtattaataatatcaatattatcaataggaaaatcagttgtcctttagatgatgggattggaaaacagtctgtagaattttcataaaattcctattctcatttcaacacacatccataaaataggaggataaaaagagaaaattgttgtttgtggttaaatatgcacacagataatttgagaaatcattgtcaaactgtatatgccatttatggctggggcttcgggagaaactgaggttacccagaaataacgttaaaaatgcagtacaatgcttaataatattgtattgtacttgagttttgctgaagagtagattttaggtgctcttgccacacacaaaaaaaagtgggtgagatgatggatatgttaatttgcttgactatagtaaccttttcactatctatgtatcccagacatattttacatcttaaatatatacaataaatactttttaagaaattgattcataggaggtatttatgtattcccgatatcaatctcttgttaatacatgcattgcgaatgtctcatttttagaatccagaccattactcttttcactgtctatagggtgatattaggaaaggaattttaaatgcttgtgtaattgaaatatttaatattttcttctatgtcttagtttttgcacttgtaaaatgtaattgtgcctacctcacaacattgcgatgactgaatgaaataatgcatgccaagcacttatcccgtactaactgagtttttggctcacaagtgttcagtaacaatttgctattactattatggtaccctttattatgcaaagacctgttcagtgaaagaaaaataattttatgtctgggagaaaaataagtaaaataaaataaaataaaatatgcagcatctgttggggattcacatacattttattttttaatttttaaatttccttttaaagatgaattttattgcatatatttaaggtatacaacataatgtttagggacacacatcgatagtaaaaatgttagtgaagcaaatcaacatatccatcatctcacgtagttaccctttttttgtttctgtgccaagagcagctaatgtctactcacttagcatggggattcacatacattttaaataacaaaacacagacagatattctctcatattcacaggtgaaataaggtaactgaatggtaacttagctgacccatgactgcaggtcaggagaaatatgcggaggccttagaaaagtaatcatctaaagatgatgtgctctaatccctcatcccccaagatgaggaaactcagatccgcagtggttgcaacattcagttaacaggggaaaagctagttagtaggaaagccagaacccaaacccaggcatgcataacaaggcctagttcaatgaagagatcattatccaaaatcaaacggaatgaccacggaattctcctaagggtctacttcctgcacccatgtgcacctgggcttctctgccaggctttgtggtcatgcgccctcagacacaggtgtcacctgatatcttctgcttcaatatattcaacactttgagcaggtggacatgactctcagcttgagactaagttgtgtcaatgatctggtggagctccaggaaaaagcaagcttctgcccaggcacctgtaatcccagcactttgggaggccaaggcgggtggatctcttgagctcaggtgttcaagaccagcctgggcaaaatggggaaaccctatctcaaccataactacaaaaaattagccaggcaggtggcatgtgcccgtagtcccagctactcagaaggctgaggcaagacaattgcttgagtccaggaggcagaggttgtagtgagccaagatagagccactgtactccagcctgggtgacagagtaaaactatgcctcaaaaaaagaaggaaagaagaaaggaaggaaggaaggaaggaaagaagaaaggaaggaaggaaggaaggaaagaagggagagagagagagaaagaaagaagggagagagagagacaaagaaagaaagggagaaagagagaaagagagagaaagagaaagagagagagagagagagagagcaagcaaaagcaaaaaagcaaccttcctctgtaacactccactctctgcttcatgcttccatagttttgaggttatgttcctaatctggagatcttgaacccaaataagtctataaaggacttcaggggtccacaaacccctggatcatatgcacaatgtcatgggtttatctgttttttttttccttgagataattaccataatgtttatcagatttttaaaaaagagacctgtaatctccaaaaaaaataagaaatcaaccaaaccaggtgggcccttttggtatagttagattgcccaacttccagcctcttctctactctgaagagtaatttaaacatcagtatggctgaagtacagtgtcttgtaaacagtgggtgctcaccaaataatcatgaccctaattttactttaaaaggctttctctgagaactgctcttccagtcctttatttgttgtattattactctttctaatcagctttctagaatgagctagtttgggatcacctggtctcatatctctttttcttatgctataattaaaccaaatgattttaatgtggccctgaatttcccccttttgactgcaacaaaattttgtacagaaatcccacagtatcctccactctttaatgtctaggtaaatttgtgtctctttttatgaaacaattgttatatctgtttgcaatgaatcgagaaaatgtagaacataagcctcagatttactgatgagaagatcaagacctatatgttagataaatggacatgccaatggtcatactgttagaaggtggcaaatcttgtcctatacctaatccctctctcgctctctttctctttctctctctttctcttttcaacattgagatttgagcctgcatagttgcaatttcctggaggttattgaaatcatcttgagccagtgactggatgtaatgttaccatctgatggccaggtttcattcaatcaggcgacttgttagaaccaagtgatacagttcagaaaggcctgaccatgggggctgggatgtcttcctctatgaaccgttgttccgatgctcggtcagcaggtttgttatgtggcccccatcctccggggatcaccagggttctgggtatgcccctgtctcatctgattagtcttatctggcttgctcttcatttgccccttaatgaatgtcattaaatttcccacaacctacaacatctacacgctgcctccttcatttttttccaaccagttcattcactttccctgagtgttgtttggaatacgaattgcattagtcactatgtttattctgctgtgctctagagtctcatctttgagtggtgctgtttcttctgctaaagcaagagttgccataggaacaggcctacatgttttcttcctgtacaggaagtgaacctgggcattgcaatgctgttttcagagttggtcaaggctagctcataatgtttggctgcttatttagatggaagagaattgatgagccaagggatattatttctttgtttctcttttttttttttttttttggttccattaaaattgctctcatttggctttacttccaaattatttttcttcctcttgccaataatagtgacattgaaactcaaaactagaactgattttggccagagatatcttcactcctgggagactttattaaggtttgcagaaccactcaggatgtgatgtgacagacattttcttatagttgtgtcacttaggagcaatgaaggctttaaccacaggcagggaaaagagttaccctcaagatagaattaaggaaatcagaaaacaatctccttgcccaaatatctccccggcagccatctcatgtggctgtcagccacagggcctgaaattcttcccagagggacttcttcctcttggttagtatactgcctctcatccagctgtgtgaacctgggcaattctcttaactctggatctcaatatcctcaatgattacatgaaccccagtggttcatttcagctctgaaaagctgtgactatacatcctctaaaaggaataatttttgaatctactattcagtcattaacctttaacaggtaaataacttgcctagatttctcctcaatgatttttttttttttttttttttttttttttttttttgagacggagtctcgctctgtcgcccaggctggagtgcagtggtgctatttcggctcactgcaagctccgcttcccgggttcacgccattatcctgcctcagcctcccgagtagctgggactacaggcgcccgctaccacgcccggctaattttttgtatttttagtagagacggggtttcaccgtgttagccaggatggtctcgatctcctgacctcgtgatccacccgcctcggcctcccaaagtgctgggattacaggcgtgagccaccgcgcccggcctctcctcaatgttttaacacaaaacaagtaaatgtagataataagagatgaaggaagactccagggtatgcccaggtggggccttataaggtcaatggaaacctaggaaggggagaaggggagagactgaaagggaagtggatccagaaaagggaaatggatggacaaatgctaagggcaaatttgtacttacgattttgtctggaggaatttaaactgtcctttgctatttttgtggcatttaaaaagaatagaatatctttagatataaaaccttatatatcaatcaaggaaattgtataaagtgccagaactatgcaagtgttttagggggaattcaagaaaaacagcaaacctagtacccacccttgaggggtgattagcagtgttgggtgtgaaccatgcaggcacctgaggcaggtatcataaaggtcaacggttcgtcatgagtcatctttgaggcattgctggagttcagggacagattccattgatggggaggagccaaccatttctctggcaagtactccacctctctcttctctctcctgcctctctccaccattatcactcagactgtgcatgctgcaagctttgacgctagccaggctggctggatttggaggactgtgataactcctacagctttttgactgggcttttgcttcatttgttcaggagtctttgtgccatgttgcttcactcgtagtacgttattcacatatgagtgatttctttcttgtcagttttgttcagtgaatagaagatactacaatggtacagagaaattcaggcaggtcagagaaattactagaatacattagattattatttcatagaatttaatgagattgaattaggaaaacaatcaggaaagtgactgatgatcagagaagtccatgagggtaaggaggctgctaacagcagccccactaacatcttttatattcatgacttgttgactaacgggctgtcattctgtctcccagaaatagatcagaatgactgaaaaagccccagagccacatgtggaggaggatgacgatgatgagctggacagcaagctcaattataagcctccaccacagaagtccctgaaagagctgcaggaaatggacaaagatgatgagagtctaattaagtacaagaaaacgctgctgggagatggtcctgtggtgacaggtatgtgtgtacagagaacagggtgggtggaagatcgctgagagggaagaagacattttggctgctcaggagcagcagcaaagggaagaggaccaactgcttccaggaaaaagtgagcgaggcacaatttatatatgctgattaaagttatgaactgtataattaagtcttcttaagagataagatgcaagtcagcagtgagataggcacacataacacacagaggggatttagaaagaattccaggctaccacttagaattgtatttctctctctccattttctctctttctcagtccttacctaaccgttcatctcttccacatacaccgcggcagaacaagacatggcccagagatataaatggacagtgcccaattagcagagtacctgacccatagccattcaggaaatgttggatgtcaataattagatggacctacaagtgcctaaagcagaaataactttgctgtaatttacaaggccatcaagaccaagcatagcaaacctgccacatccatttctatttctactccagatagaaagatcacttttattttcatactctctgtctcccacttgaaatgcacacacccactatacacatgtctcttcttggtacttacattccctttcgatcctgcagatccgaaagcccccaatgtcgttgtcacccggctcaccctggtttgtgagagtgccccgggaccaatcaccatggaccttactggtatgtagacacatctgtactgttcaaagggggcctaagatatcacaaagaaaacttggtctctgtctcctgttccaacagaagaaaactggtgaatcagagagatatatatgctaggaccagttaacaaatcattgctcttagagtgcacagtatttaccatgtttcatgaaaagcccaatctttatctctatttaattgaagagagtgcaggcatacacatttgatatatttacagatttttgtctccacatgatagtaagagaattgttatttatgcaataaagactgctgatggaaatattaagaaacaaattgtgtgcttctgaagttataaggtttatacagtctaaacatcaaagtattgatcttctatccactacaaaacttactggaaggtgagaagcaatccggaattatactagaaattccactgctatagattgaattgttttagcttgaaactctgattcttgttaaataaacaacgtctcctactaaaggcgtacaaattaagatgttattttctttcaccttattgtaactaagggtcaagcctttccctgagacttagggcttgaggaggagagagactgggaagggggttattgtggaggaaatgggcatcagaggggatatgagaggagaagcacggagccaggagattggggccttcaaaggcaagtttttagtggaaaaaaaaaatagttaccaaatgaaaaaattggactcttgtgagacagacaaagcacaagtctagaacagttggcttagttagcagcagagtagttcccctctcacaggacacagccagtctttaccttatatgggcttttttgtcagagggaggaaatcagaggctgagaaggcacacttcctgttcaactgaaatcattagagcaggcacacacacacattcagctaccccgacatgctgacatctctccaggagagaaactcacgctctctcaccagaactcagagtcttcctaatattaccaggtacagctgccagtttgcaagataaggtctgaattagcgctaaagaaatctgttctcttcagcaggacctggtagtattgcaaggaaaacttggtctctgtcccctttcccagcagaggaaaaccaaattgggttttctgtcactaacaagctgctatgcatgaagaaaagcatagagagtgattacctccttaatcagggtacaggaatttgggacagatcctggttttatggaacctgaagcttttataacttcagtgatattccttaagaaaaatagtatgaaattgcaaatgaaaatacaagagtaaacacaaaggtgaacattttcttaaagtgataaaatgaataaaaacaagtagaattttaaaagctagaaaatgccacaaacatcaccaaatctataaaaacaaatagctgacactcctaaatactatttttcttatatgttttatttgaggggtaaggggcatattctttaataacctcttcatttgaccagtaatataattctcaatgagagaataaatggaccaaaaaaagatttatcttcacaactcattatttgtaatgtcttgtgtatttttagcattgtcatcaaacttgggggcagggaaactctcatgtttttcataacagagctgtaagatttcaggcattacgtgtgtgtgtgtgtgtgtgtgtgtgtgtgtgtgtgcaaggactaaactcaaatactctgtgaattgagggccctgtgaaccatgttgccctcgtgggcccaacaaatttttccgggacttaaaagtcatttattaacttgtgtatctgcttttgaggataaactctctctaaatcttcttctacaggagatctggaagccctcaaaaaggaaaccattgtgttaaaggaaggttctgaatatagagtcaaaattcacttcaaagtaagtatcctgccttgtgtgtttttgtaaagtttaaatcttttctttaatcagtgactacatttcttgcatgatcatgttgaggtactttttgtttgtttctcccctagtacccccaagctaggtctggaatgtcctcttcccagccctgagggctacctgttgagacccacgtttgcctcctgtcttttcctagccaggacttcttaaactcttcattatctcttaagccaatgggatccctctgtgaactccaaacacatcctcgaggcacacactgctttgtgttgtaccacctgtgtcatttcttcttcatagaatataagcacctcaatctagggtgaaattgtacatctctcctttccaatatttcacacaaaactttgtaaatagcatatagttcatgaatatatattgaaaagtggacaaacaagtgaatcaaccaataggaaaagaaaatgggacagggcctcagctctaattgctcaaggattatataaatccaggaagtgtgatctttgctaaagaactggaaattacaattatagttgtggaacaggtaaccaggaaagaggaaactaaataagaaataaactgacatctaatatatcccaatgagccatatatcccaatgagcagccaaaatcacaagaaaaataactttgactttgaaaacaaataagttagaaatgcagtgtttgcacttcgtggtttatgtttgctttggtggcctctcattcccacttagcctcagtctccagggcctgggctccaccaaggaagactccatctgctctctctatttgcacactgggaacttttttccccaaggtacaggatatgattcagggtttatggatgacctccctaccccatacaaatataactgaaaataatttcatcctggaaatatttgttgatgcctactctataatggacactgagctagggttcacttacttgtttcctgtcatattatttattattggagcacctgaaggtttggtaaggcattatatcaaaatatgcctagaatgggttgcacatcagtttcatttttaatcattgatgctattgcattaatttgtctatttggtaaaccaggtttcctcaaatgaaatgtgacaggtaaattttgacgtgactaagatgcaaaggaaagctctggaacaggggcttctcctctggatggggaggtggaggaggaatgtggtatgtgggtctgtgtggacaggtttacacattaggatgatgcaggaggaggccacagaaaggggcttttgagtactctctaattcagaggtttgatggctctctgggtaacctacgtaaagttgaaccatcctgtggcttgtcccagcatggtgctacaattagaagaaatgccagatcaaagtcaaaaatccttgaaaaacaacttaaatcttcactgaagtctcttgaaaaatgtccaagaaagtttgcatttataacacaagtaacacatgttaagtcctctttcacaatctctgttagttgcactcaatgttctttttctcctcccaaacttcttagcactttctaaaaacctgacctacgattgttattttaggttcttcccaactttttttctgcctcccaaggaaatgtggtatctctgacttccacagctctcactttgattcataacaccaaggcttcttccccctggagtgggagacacaatagggatggggatgtgggcagaagaagaggattctatgaatattcatagttttatttcacccaccccaaatgtatttatattaaatggacccactgaagagcgctggtgagatggtagactctttgtcttgaagtccttattgctacaccaatataattcttcttcttaggtctttctcccactaggtgaaagggataagcttcgggacatctagaaaggtgcatttattttccctattcctatgagctacatttgagactcacagtattagaaagcctgggctttatcacagtctctttgatgatgctaattttttttctgacagcttttcataggtttatactacagatttaccctgtgacagtcaagaatctaagctggcagagttcactgctctgccacctccctgccaacaaaacaaaagatagcactggttgattggttgaactattgtgtccaacacaaaaggacagccataattattgttgaagaaaaattatttgaagatgctttaattcttcacattggtgaacagataaccaagctcttcggctaatgatgcaatgtccactttaatttgtttgtatagacataacgactgtgtaaaattaacagacaacccaggtcagtcccaggtgaaatgaatcatggaaaaacaaagttcttgggctgtccacattttcattctgcgttactgaattttctttgaaaggcttgggaaaatagcaagatctcagacaacgtctgaaaatgacagacatccaacatacttgccagatacaagtgaatttcacccattatttcagttatattgcagtcacagccatcttctagacatgaattttcactttcctccttgttgtttgttttttatatggtaagtggatcatctctgaggttgtggtttttagatatttacataatgtgctctattggtatcttcataacttttcctaagacaaggatggtctcttggtcagcagtattggagagggaaagctcaaggccattcttgggaccattgagaaaggagaaatacaatgaagaatattgggccaatgttttaatgaaccactcctctctcccaaaacggtaaaaatcaaaatgttcgataattaaaccagtttggcaatgttgcattttatgatttcccctctctaatctttgcctcacagccatgctaaataattatagaaacaccaattctgaactaaatctttagttttttcattgtcagagacgattcagctaggcaggatcagcatgaaagatgagaaaaaatgaaagaccctcttaatctgaacatcttggttccttcccacctgcaggtgaacagggatattgtgtcaggcctgaaatacgttcagcacacctacaggactggggtgaaaggtaagggaacccacatttccacactgtcccaaactgcttctcattgatactttaacttctggttattagcaacttttagctatagactcagatgagaatacaataaaagctgtggatgccggctctaggaaaaggcacaaatacacctctgatatagacattgacaaggccaatgctcaggggacctcgtttagactgcatcagctgctaaccttcagcagtcagctttttggattcaatattatcactcgtaaaggagaagagtaaccaagataagtttaaaggaaataaagtatataaaaatactctacaaagtaaacaaccaaaaaaggcagttcacaggtacaaaacccaagtgtcagagaaaaccaagaaagaaaaaacttgcccagtgccatgtgtatctggggtgggagtaggtgggggtggcattggagggaagggggaggcaatgctcaatttcctaacaaagaaatagaaaaaaaaatattttctaggattgaaaaagcctgtctaattaaaataacacaacaacattacttaatctgcaattcttcttgacatgccttgggaccctgccttcaattttctttcattaatataggcagggagaaatgagaggcgggaaggtgatggaggcactttacagttcctttctacctaagggtctgtcccctccagaggcaagaaacaacaaagcatgtctcagtttccaccaaattaataagcaagataggggagaaattgtctgataaatctggatgacatagaggaccagtcaatttctcaaatcccagagaagaccattgacctgaaagatattgattggcctttccgatacctagtctcatgaaaaaaaagtttaatttcctattttcctttgggcataaagcccgtatcacctcacttagacaaaaggacagtgacatgtctgcaactgttttttcaaacttattagcaacacttagccaactatatgccacctatctgcctatgtatacttttcaatgcccaactattcttaatatatattccagttaaccacctataaataaacttgattggctattttcaccatttgtcctagttcttcacttttttttttaccaacttactgctgttgttgttccatccagttattctatccatgaattctcatcaccatctgttactttatctcccccaactgatatgttcatagaatgacagtttgtagatagaagatccttaaagtccatcatatacacaaagaaatggaggctcaaaaatgttatatgacttaggccattgcaggactgagatcagaactgaggtctcaatttgtctgagttttttaaaatggtgtaatctgctatatctccataaaaaaaacaacaacaacaacaaaaaaaaaaaaaacaggcttaatccccattgatttaggccactggttccccaactttacctcagaatcaactttgtagttttttaaaaacactgatccctgggacccacagaaggttactgaaccatagcctttggaagtaggacaaaggaaactatattattaaaaggcactccaacttaaaaaatgttttaaagaataatttttttaaaaagatgcctcagggccaggtgcggtggctcacacctgtaatcccagtactttgggaggccgaggcgggtggatcacctgaggttggtagttcgagaccagcctgaccaacatggagaaaccccgtctctactaaaaatacaaaattagccaagcatggtggcgcatgcctgtaatcccagctgctcgggaggttgaggcaggagaatcactggaacctgggaggtggaggttgtggtgagccgagattgtgcttccgcactccagcctggacaacaagagcaaaactccatcttaaaaaaaaaaaaagatgcctcaggtaaatctaatgtttatttaggcttggaaaccattgctcttgactttaatcactgtaggctgtagtccagattctccagtttgcagtgtatgtttttcctctatcaggctcttaccctaatgaactcttctttcttcttagtggataaagcaacatttatggttggcagctatggacctcggcctgaggagtatgagttcctcactccagttgaggaggctcccaagggcatgctggcgcgaggcacgtaccacaacaagtccttcttcaccgacgatgacaagcaagaccacctcagctgggagtggaacctgtcgattaagaaggagtggacagaatgaatgcatccacccctttccccacccttgccacctggaagaattctctcaggcgtgttcagcaccctgtccctcctccctgtccacagctgggtccctcttcaacactgccacatttccttattgatgcatcttttcccaccctgtcactcaacgtggtccctagaacaagaggcttaaaaccgggctttcacccaacctgctccctctgatcctccatcagggccagatcttccacgtctccatctcagtacacaatcatttaatatttccctgtcttacccctattcaagcaactagaggccagaaaatgggcaaattatcactaacaggtctttgactcaggttccagtagttcattctaatgcctagattcttttgtggttgttgctggcccaatgagtccctagtcacatcccctgccagagggagttcttcttttgtgagagacactgtaaacgacacaagagaacaagaataaaacaataactgtgtgtgttctggctgagaccttcatttccctgctttcttgctttgaacaaatatgataactggatggttcacattcatgagttccctcagaggggatggggatgaggaaaacacactggaggagatatttacatctttgggaacaaattggtcccctattacactataataggcaatgcacattcagaatacagccagtgggaaatctacattttacttatttagttagctatttttaatttcgacttttatattaggtatagagggtacatgtgcaggttcgttacatgggtatattgcatccaggtagtgagcctagtactaaatagatagtttttcaaaaaatgccccactccctcccttacccctcaggtagtccacagtgtctactgtttctatgttcatgtctatgtgtgttcagtgtttagctcccacttataactgagaacatatggaagttggttttctgtttctgcattgctttgcttaggattatggcctccagcttcatccatattgctgcaaaggacatgattttacttttttattatgaccatatagtatatcatggtatatatgcaccacatattttatccaatccaccattaatgggcaactacattaattccgtgtctttgctattgtgaatggcacaacaatgaacatacatgtgcatgtctgtttggtacaacaatctactttcctttggatatatacatagtaatggggttgctgaatcaaatggtagctctgtttcaagttttttgagaaatcttcaaactggtcactctccatacgttcgtaaaaatattatgccttggaatgctaacgttactcctaaaaattggagtactctccttggccttactgtagagataaaaggtatagatgtcctcattacttagagttgctttccacagtggctgaactacgtaactgcttaagctacatccccatgaataatgtataagcattcccttttctctgcagtctcacagtgtctgttgttttttgattttttaataatgtccattctgactagtgtgagattgtatctcattttggctttgatttgcatttctctgataattagtaacgttgagcattttttgtaggcttattggcctcttgtgtgtcttcttttcagaagtatctgtttatgctctttgcccattttctattggggttatttgttttttgcttcttgatttgtttaagtttcttatggattctgaatattagacctttgttggatgcatagtttgcatatgctttctcccattttgtagattgtctatcaatagttccttttgctctgaagaacctctttaattaggtcccacttgtcaatttttgtttttgttgcaattgcttttgaggacttagccaaaaattacttgtcaagattaatgtcaaaaagagtatttcctaggttttcttctaggacttttatggtttgaggtcttaaatctttaattcatcttgagttaactttttatatggtgaaagatgagggtgcagtttcattcttctgcatatggctagccagctatcacagcaccatttattgagtagggaatcctttccccattgattggttttgttaactttgtcgaagatcagatggttgtaggtatatgactttatttctgggttctctattctgttccattggtctatgtgtttgcttttgtaccagtaccatgctattttggttactgtagccttgtagtatagtttgaagttgggtaatgtgacgcctctgtttttgttctttttgattaggattgctttagctagtcagactcttttttggttccatataaattttagaatagtttcttttctaattctgtgaagaatgacgttggtagttagataggaatagcactgaatctgttaatttctttgggcagtatggccattttgaagatactgattcttcctacccatgagcatggagtgttttttcatttgtgtcacctctgatttctttcaaaagtgttttgtatttctccttgtagagatattttacctccttggttatctgtattcctaggcatttcattttatttgtagctattgtaaatgaaattgtgttcttgattttactctcagcctggacattattgctgtatagaaatgccactaatttttgtacacttatttttttcctgataccttactgaaatcattcatcagttccagtagccttttggcagagtcttcagagctttctaggcatacaatcatattgtcaacaaggagaaatagtttgactttttcttttcctgtttagatgccttttatgtcttcctcttgcctaattgccctggctagggcttcctaatttcttttgtaatattttcacatgaaaattctcctaagcttaaaactacatatcccaatgcctgtggaaatctcatcttggacttcctcagacacttgtgagcaaaatcaaacttcatctcattcttctgcttaagacttttcagtggttcccatcacctacagaataaaattgatgctcccgcgcttagtgtatcatataaagcctgctgtgagctggtcccaacatgcctttctgtccacatgtatcacttccttccttttcatcattctcaattactagtaattctgtcacacattatatttgcatatctgtgctttggttcttttttttttttttttttttttttgagacggagtctcgctctgtcgcccaggctggagtgcagtggtgctatttcggctcactgcaagctctgcctcccgggttcaggccatcctcctgcctcagcctcccgagtagctgggactacaggcgcccgccaccacacctggctaattttttgtatttttagtagagatggggtttcaccatgttagccaggatggtctcaatctcctgacctcgtgatccacctgcctcagcctcccaaagttctgggattacaggtatgagccaccacgcccggcctgtgctttggttctttacatgaaactccctttctaccttgtgttgcctggcaaaatcttacttacccagaactctgctccggcatcctccgcaggaagaacactttcattgaaccctagcattgtccctaatacccttaatatgtattgtcatagcaccctatgaatttttctatatcactttccatcttatatttaaataatctttttacttgcccatctctcccactgataatctaagctggcagaggctggatcagatcataattatctttctattcttagcgctaggatcaatgcctggcatagcatatttacattttttatttaaataaactgacctgactttcttctggttggatatgttctgagtccctattactaaccttggtcttttatctcagaagttgaaggctcccctggagccagctgcaaagttcccaaagccctaacaaccccacagccaatcagctacagagtaggctgccctgagtcggcctccccaacacaaagtccagggttggagcaggagcaggagagggacaatggaagctgccccgtccaggttcatgttcctcttatttctcctcacgtgtgagctggctgcagaagttgctgcagaagttgagaaatcctcaggtaaaagaaaaatgtagttgggtggctatagtgtgaaagtgttattaggagaaggaaagggagcatggtggttctctgggtacttttcctccacacctagaaagctttccaggaaatcctggataagatgcattttgcctggtagagagtagggaagtctggcagtatccttcagagacagaccatcagtagggtcaccttccatatgttagtaaaaatattatgccttggaatgccaacagtactcctataaattgtgctcttcttgcccttagtatagagataaaaggtatagatgccctcattatttagagctgcttcttcttgcctcagtaccctgacatcttctgcttctctctctagatggtcctggtgctgcccaggaacccacgtggctcacagatgtcccagctgccatggaattcattgctgccactgaggtggctgtcataggcttcttccaggttagttccctacttgcaattcccccaagagccagaaatgttctaccttaagggaaccacagcagccacctgctgctggcagatggcactgcattagaagtgggggtaaagggagacagccacccagtttgatttcatcttgtccattgggacctcttattttcaagacattcccagtctctaaattatatctttctcatacttacttcaagagttctgagcctgtgggctgcatctcctcatctatggatgctttgaagctcaagtcagtatctgcagaaagaatgccttcatggaaccccaccattgtcctaaacacatttggtctatactctcatagcaccctatgaataggcaggggccagagtgaacccaatttatatcatccagcaacactgtttacaggatgccaaacatcctggacattagtcagtgcacagccttttaaagcctttcccccaaatatggtagactctccttctttctctttgccttgtctgaaatgttggaaaatgatggcattttgtatattcaaggtgttaacctccatcttccagattagcttcttgactaagaaaggcagccataaatgagactgcctcattccagcattttcatctttctctggtggtagcatctggaaatcctcacagctgatcaagcccctactctctcatagcagaccttcttgtctgtttccatttctcagttacaactcctgattaccctgtcagttctgcgtacacagttggaaatcactgcaatgagatgcaagtcagggagaaagacagggacaacatttttcaggaatgagaaatctgagctgtagacaaaaacaccgtcagaaagatggggaaggggcaagagcatggaattggaggagtgtgcaataacttaaacagccgccagatgccatcattttatcctccagcaattccatctgaaggagcagaataagagaggaggcctcaattaattattgttcatggcctctagaagagtagataccagctccctctgcttgaccccagatgcaagacgggtatgttagtttcttctcatgctgccaataaagacatacccaaaactggataatttataaaggaaagagttttaattgaatcacagttcagcatagcttggaaggcctgaggaaatttacaatcatggcagaaggaacctcttcacaggatggcaggagagagaatgagcacaagcaggggaatgccagacgcttaaaaaaccatcagatcttgtgactcatgcactatcacgagaacagcatgggggaaactgcccccatgatcccattactgccacctggtcccacccttgacatgtggggattatggggattacatttaaagatgagattttaggtaaggacacagccaaaccatatcaactggccatcttcttttctccttgcacatctcctccttcagcctggggacttgcagggtagaacatgtttgttcctgttaatttcctggagctgctatggataaaggtcccgtgagagcagggaaaatgatgccagcgtctatggaaggcctggaatcactgttcgcaagtggcttctctgctgcctcctgcaggcctgggctgcagagttgaatgcgtgaacagcatcttcatgtgcaaagctcaggtttatctacagtggcaagagagggactgtccttccataacctgcataaacttttgttaaaacttctaagctttcattttaattgttttatttttcttctttttttcttttttggcccttttgatggcgtctatttcatatttttgcattttttcctttcatccacaaatgtaaccaaagccaaaactcaagaggaagagccggtgggaggaaaagccagtttatttgaagatccagtaaaccaagaagacagcggactagcatcctaaagtacatcttggccgggcacagtgactcacacctgtaattctagcactttgggagcctgagggaggtggattgcctgagctcaggagttcaaggctggcctgggcaacatggcaaaaccacatctctactaaaaatacagaaaaaattagccaagtatggtggtgaacacctgtagtcccagctactcaggaggctgtggcacaagtatccgtgaggcagaggttgcagtgacccaaaattttgccactgcactctagcctgggtgacagagcaagactctgtgtcaaaataaataaacaaagtacatcttaagccactaccaattttaggttctttgtatgttaagggcagggtgaagaggagggagttgggatcaagtgataaccggcaaccacaggcatctgggccccagcaagtgtctcaggaagttgggaacttctttgtccttggtcaggtcacaaggcacctataaatctgtagcactacatagttagttgtttacatacttttcctttaatcccagagttagttttaaaaactatataactcctatttttgcctattatctcagtgctctaaaattattctaacctacatgcaggaatgagtaaataaatgccctttaaacaaaaatagagttggttatgttagtttgtttgctatttcaccgttaaacaaattgttcccagaagagttgcttctcatgtgtatctacaacagtgcagccaaactaggcaggcctttatgattttgaggcctctctcagcccctagtaaacttcaagctctatgacaaggcctgacaggagtctcaggctcagctacaatttcgtggttacctattaacttacagagcctggaaaattcaagaatgtcactgccagttaaacctgaattgttaggggtaaatcatgtgttactgggcagtaaatcaaatctatgatttctggtaaacatcatatcatatttcttttgcctatcgtttgtctctgcccttcgaaataaccactgtggtattattttttctcttgtttttaggatttagaaataccagcagtgcccatactccatagcatggtgcaaaaattcccaggcgtgtcatttgggatcagcactgattctgaggttctgacacactacaacatcactgggaacaccatctgcctctttcgcctggtaagttgggtgggtagcttgagctttctcccagattttcactgggttgtggactcataaacttgtgagactggaaaggactctatgtcttttacactaatgatggtaccaaattcagggacattgttgacaaggatgatgactcaattcaagcttcccaaacaggtactgtaatgaaatggaaagaggacaggactgaaagccagggaatggaatttgtggtactgctttgtcgctcaacagccacatgactttgggcagtcacttaacattttttatctccaattctttcctttataaaataaaagagttagactgtattatctctaaggtcactttgagctccaaaatttttatattaaatattttgaggagttcatttatgttcttcaaacatttattaaatacttcctgtatgccctatgcaagataccgataataaaaacatattaaatatattctccagtctcatagatctttaagtatggtaggtattgtatatataatatgcaagtatctataataaaaagagaatcactatgggtaaagttttatcacagttcaaaggatagaaacagtgtgggaattctgaaaaaaaagaaaagaaaaagacaacagaattgaaacttgaaggatagataagtttagacaagctaaagaattcatggccaacgggaaaaaactcaggaaacaataaacaggccaatctcactggatcccagggtacacattggggaaaatgaatataagagaaagaaacttgattaaaatcgtattgtggggaaaaagtagaataccactttaatgagtttgtcctgaatttggctgttactggaaagcccctaaagcctttacatcaggggagtaacatgaacagaaatgtgttttattagattattttgacagcaaggtggaggatggatttttaggttaaaaggcaagagaagagggagcttttgttaggctgacaaaatagaccatgtgagaagtattaagagtctgtagtagagaggtagcaacagaaattaaagaagaggaagatcctgtgatcattagatatcacagttatggaaagcaggcaaagcttaaagccagggtgtctaagaatagtgaggtcatgtgcagaaataggggtttctgatgctttcattggtcattgagttctacttgttggtggaatatcaagagtccactgaaaaagagtaaattgatggaaaagaaaaagttttcagtatttcgggactgaatgtcgtgccccttctagtttccatcctttctttccctttcttttctcattgaaacttctttaagtgtattttgtactgtctttctctaaactagacactactatctagtttatgcccccatcacaccattaaaactacatttatccaggtctgcatggcttccatattgccaaactcaatgaaccctttttaggtcttattttactcaacatttctgtcatgtatgatgttagtgatgacttctttctttttaatgttctctctttccttgaattctaggaaactacttctcctgatcctcctgctgcttttataatctctttgagaccttctcttcctgtatctacaatgctgcctgacccaacactttttacagtctgggtcatggaacccatgctatgtgaaggcaaagactgttctgttcagtgtatccacagagcctagaacagtgcctgctgtgcagtaggtgctcactaagtatttgtttagaatgaatatatgaagaatcaatgaatgaatgaatgaatgaatgaatatgttcttcttaagaagtacaattcttttgcatattccactattatgtgcttgcggaacatttagaatattttatccctagtctggacttctctcatgattcaaatgtttgctgggtatataccctcataagcactatactcttaaaatgttcaaaactgaatttattgtctgcacctgctaatcatattcctccatctaagatactattttattaagtggctatgctcatttggtcttacatttttgccagttgtatcttctatcttgaatctatattctcctccactccttctacctcattctgtatttaggctcttagcctaagcataagcaatttcattagcttctgaacagatctccttttactactttatatacagtttctaaaatggtatcacaatgatgtatttaagatagaaatttggccatagcactcttctctttaaaactcttcaacatttctcatttcttaaaaatcaaaaatgagatatttaatgttacaaataggctttgctggcctgccccactgcctgcttctctagtcctttttccatccagcttccaccctgggctttatcctctcagtagccaactatacacataatgatcatccaattccatgattttgcctagactattccttctgtctagaatgccaccacccgccaagggtcccctttcacctagcctcacccagatgactccttctcatactccagtgaatcagttcaggaatgttacccttcaggaaatatctctggaatctccaaatgggcctaagcattcctctatatgtaactccttatctctattttcatataccattttataattcatatcatatatttacgtatctgtctcctctattaccctcttaggccatgacctattcaaggctggaaacgatgacttattcatctttgtattcaaagggctataatacacctctggcaccttaaaggcactcggagggtgcttggggaactaaactcacctccaaaagcatgtctgaagttgtgtgagctcccttcagcaacccc

SEQ ID NO: 539 - DNA, 1250 bp, Homo sapiens
gagacagcccagggtttcctcttcaagtaggtctaaaacatttttttttctcattgacttccttcctgttctaactgccagtactcagaagtcagagttgagagacagaggcaccccggacagagacgtgaagcactgaataaatagatcagaatgactgaaaaagccccagagccacatgtggaggaggatgacgatgatgagctggacagcaagctcaattataagcctccaccacagaagtccctgaaagagctgcaggaaatggacaaagatgatgagagtctaattaagtacaagaaaacgctgctgggagatggtcctgtggtgacagatccgaaagcccccaatgtcgttgtcacccggctcaccctggtttgtgagagtgccccgggaccaatcaccatggaccttactggagatctggaagccctcaaaaaggaaaccattgtgttaaaggaaggttctgaatatagagtcaaaattcacttcaaagtgaacagggatattgtgtcaggcctgaaatacgttcagcacacctacaggactggggtgaaagtggataaagcaacatttatggttggcagctatggacctcggcctgaggagtatgagttcctcactccagttgaggaggctcccaagggcatgctggcgcgaggcacgtaccacaacaagtccttcttcaccgacgatgacaagcaagaccacctcagctgggagtggaacctgtcgattaagaaggagtggacagaatgaatgcatccacccctttccccacccttgccacctggaagaattctctcaggcgtgttcagcaccctgtccctcctccctgtccacagctgggtccctcttcaacactgccacatttccttattgatgcatcttttcccaccctgtcactcaacgtggtccctagaacaagaggcttaaaaccgggctttcacccaacctgctccctctgatcctccatcagggccagatcttccacgtctccatctcagtacacaatcatttaatatttccctgtcttacccctattcaagcaactagaggccagaaaatgggcaaattatcactaacaggtctttgactcaggttccagtagttcattctaatgcctagattcttttgtggttgttgctggcccaatgagtccctagtcacatcccctgccagagggagttcttcttttgtgagagacactgtaaacgacacaagagaacaagaataaaacaataactgtg

SEQ ID NO: 540 - protein, 199 aa, Homo sapiens
IRMTEKAPEPHVEEDDDDELDSKLNYKPPPQKSLKELQEMDKDDESLIKYKKTLLGDGPVVTDPKAPNVVVTRLTLVCESAPGPITMDLTGDLEALKKETIVLKEGSEYRVKIHFKVNRDIVSGLKYVQHYTGVKVDKATFMVGSYGPRPEEYEFLTPVEEAPKGMLRTYHNKSFFTDDDKQDHLSWEWNLSIKKEWTE

SEQ ID NO: 541 - DNA, 26933 bp, Mus musculus
cttgagtgcagactgcagacatcctctgtcttcacaagcacggcttctcttgttttcttccctgcttctgtggtttctacccactcaaagactgttacctgctcaaggtcacaaacatgttttcctgtgtttcctctggcttttgtaggttggggcatttacagttatagctatgcttcatccgcctactggatttcactgcagtagctacagatgtcagaacacgctgttgatgtctatgcttttaatgctattttgttgctattgtttttcatatgaagtcccactgtggagctcaggctggcctaaaaccttcttttataagctcctccccaaagtggtgagattataaacccagtttgctattttttaagagatttattttatcatttgtgtgtgtgtgtgtgtgtgtgtgtgtgtgtgtgtgaacctgagtgcaagtgcccatggaagccagaagtgagcatcagatcccctggagttggagttacaggtggttcgagccgtccagtgtgggtgctgagactgagctctggtctgctgcaagaccagcaagtaagtgctcttaaatgctgagccatctttccagtcttagaagcccaccttctcagacagccagctctctggataaagcgtaacttcctgtctctgtacatgggcctttatggtgacaggctgtgtgaggtgtaatattccggatctagtcacacttttctgctctggaggtgactggtagtttccagccaaatgctagacaccactttggctacttgatgagccgcattctgtggggtaggcgatgcatcctctgagggaggctatgccttgtgctagagcacagccagcagcttgatgctcacattgctctccctacagcgccctctgtggtaaagctgcactctgactttctactgagcccagccttcccagggctcgccggcttccaaagttactcctaaagtagtcctacactggttcttggaagctctgtgagtacctacatcccacagttatacagtggcttgctgtccaggcttcgggaatacactcagcacacacagttgaccacctgtgtgttcttgctacctcctttctgagcattgtttaagtatcactgagccctgccttgtcaacccagcaaggcctcatgacctgttaagctcttcccagctcccagcctctgtgtagacaccatgagcccccactaacactaaccctgactcttaactctgtgcagaggccatgagcccccactaacactaaccctgactcttaactctgtgcagaggccatgagcccccactaacactaaccctgactcttaactctgtgcagaggccatgagcccccactaacactaaccctgactcttaactctgtgcagaggccatgagcccccactaacactaaccctgactcttaactctgtgcagaggccatgagccccgctgacactaacccatgactcttgacttgagactcttctcttaaagttcatggtttttcatattgctcaatttttaaaaacagttgattcatgcattttcagttttaaagaaacaaccacttacactccccgcccttccttcctttttttttttttggagacaggatgcctttgtgttgggattggggacttctctatgtagtccagcctggccctgaactcaaaatcctcctgtctgcacccagagtactgggatgggtatgtgccaacatgctagactctaccagttctcttttgatgggtttgtgcactgtttctagcatgcccaccggtctcagggcagacatgttgtttctagcatgcccaccactctcagggcagccacatgcatcactgcactggcactcctcatgctaggagctgatttaaacatatagcttacctacttataaacaattttccagacaggtttccttgcagggcagttctaacgggatagggctgtccatggagctgtaatgcactgtcctcttagccttcatggggtggccagtgttgaccactggatgctctttccagggactgctctgcctctccttcccaagatgaccacccttgccttcctcctccccaccttcccagatacctttgcctctctgcagaaggcagatgctgcccacacctgcctaatttggaccccagggtcttttgcagttcccagaaacttccatgtatcaacgacacatggctcttttctaggtccaatttccaccagaatgtcaggggtccatggcaagaggaccctcttgactggtccctcttctagggcttctccttgagctgtcctaggagtaagatctggcagaggctcagctctgccaacatgtcttggtttagggtgcctctgtgtgaggtgggggactggaggaacccagggatattgtgaaggctggagaatgtagacaggttggttttgctactacagggccagggaagctctaaggaggaaggcacagagatgctagagaggcaagtaaagtctctgggatagcaataagacaagataaacaggaacagcagggggatatgagggtggaactgaacccaaagaggcactggaggagtagtcacagactgtggctgggcaagcagcaggggtgggtgagaagcatccaaggatgaaggagaggggaggctgtggtgttctcatagcttgtaatgtacccctaagcactgcctggacaccggtgtggatggagggtgtatttatgggcccaggacaagacagcatggcaggagagagtggattcaaagacttctaccgaggtgggttccgggaacccagagcccataggaagtagccagaaaggtcaggtgtggacagttggcttctgccctggtccctgactctaggtagtcccagaggaacgtagccaaaaataagcaggggctaggtagagaagagggctactgtgaacaccagactgagatgtgtcaaggtgtctgtccgaggcagcagcccagagcttggagcgggagtctgatccagagatcaagggcggctgtcacgctctcgctcctgctgtttcagcctctgaatcctggaaagccccaggctgctgatctctgtcacagcttcctgacgatcgattggcagacgccagatctttgtcttctttgtaggtcctggcctccttttccagtccacctccatcaggacagctggagcagaagccccctcccgggtctcatccttcccagcactgctccatctctggtggttgacttcctccattcttacctctcaacggttccctcctgcatgaccttagagtacagagtgtctgtgttcatggctggcactaatggctcccggcatgcatgactaacactgagcccgatgattcaacttgtgccattaacagagaatgctcttccctcctcttcctcatccttcagaagcccatttgccatgtacagcccataacccaaccatggcaatctggctcttaggatgggtcctagggacgcccgaggtgaggagaacactaggaccttcttctaggatggaggttaaatctgtttcttccaagttactactcatgctcactacaaaagaaagaagaaataccatgggggaaattccagatgctggaggccgtcctgatgagggtcagcacaccagggtgacatcacactacagagatcagggtgggactaggggaagtcctccagaggatggctgggtgacagggataggatttggggaaacgctctgttttggatcttctgcccctatgggggtcagaggctttgcatgggcaattgtgtctgtgatcagatctcctctgccttagcttcccatctgcagcatggagaagcgttgcacccagggtaccctccacaacccctggatcaggtgggcacctggcaggagattggcctcggggcctctgggctcagggtctgggtacagccaaagggatcagggtggttgtaaatggagacagaaggcaaaagcccaggcatgttggcatccctctatctgtcaggtggcagaaataagagggtgaagccagcaggtgatagccagtagagaatgctttggtggtgggtaagacccagagccagtctctgctgtctggttttgtcactgggggcctgaacagagccatctggtgataggcatgggacagcctgggttgaaccagtcaccccagtttttattcaagaggctatgaggtagtcctacacagtaatctttcagaggttgaagagttataaggagtagaaatgggcctcagagaacatctcaatgaagacactctgtttaggtccatattcaccatggataacatctaggggacacagacccaaggcttatatgcttgtgtcccggtggtggagggatggtgtcttagtcagggtttctattcctgcacaaacatcatgaccaagaagcaagttggggtggaaagggtttattcggcttacacttccatgctgctgttcatcaccaaaggaagtcaagactggaactcaagcaggtcagggagcaggagctgatgcagaggtcatggagggatgttctttactggcttgctcagcctgctctcttatagatcccaagactaccagcccagagatggcaccacccacaaggggcctttcccccttgatcactaattgagaagatgccttacagctggatctcatggaggcatttcctcaactgaagctcctttctctgtggtaactccagctgtgtcaagttgacacaaaactagccagtacaattgaccccttgtcaacttgacacacaaacacatcactagtaagcctcaacccttacattcttattcatccccaaggtctaaacaactttaaacatcccacagtctttacatattcttaaaatttcaatctctttaaaatatccatctcttttaaaatccaaagtctttttacaattaaaagtctcttaactgtgggctctactaaaatagtttctaccttcaagagggaaaatatcagggcacagacacaatcaaaagcaaaaatcaatctccaaccgtccaatgtctgggatccaactcacaatcttctggactcctccaagggcttgggtcacttctccagccatgccctttttagcacacgtgtcgtcctctaggctccagatgcctgtactccactgctgctgctgctcttggtggtcatctcatggtactggcatctccaaaacactgcatgaccccttcagtcctgggccttcaattgcaactgcggctgcaccttcaccaatggccttccatggcctctcacagtgtcgagcctcagctgctctttgtgaccccttcatgccttcaaaaccagtaccacctgggtgacccttacatattaccaagtcctgctgcagcaggagtacaaccttggccatctctggaacacagcctctttgtgctttcagaaaacacttcccagaagacgtcacctcaacgatgctggtctcttcttaatcaccgctaatttcttagctccagctaaccagcctcaattgttccagtaatgcaaagtttttgctttagtagttctggtatcttgttaatcacagctgattcttcagctccagctaaccagaaccacagaatcttcataatcaaaacagaaatggccctgaaaagagtctttaattttccctctgaaatttcacaaaccagacctccatcttctacactgttctcaacattatcttccgagctcctatacaacatctgacagagctcttaacagcgaatggatcttcaagcccaaagttccaaagtccttccacagtcctccccaaaacatggtcaggttgtcacaggaataccccattctgctggtaccaatttgtcttagtcagggtctctattcctgcacaaacatcatgaccaagaagcaagttggagaggaaagggtttattcggcttacacttccatgctgctgttcatcaccaaaggaagtcaaaactggaactcaagcaggtcagggagcaggagctgatgcagaggtcatggagggatgttctttactggcttgctcagcctgctctcttatagatcccaagactaccaacccagagatggcaccacccacaaggggcctttcccccttgatcactaattgagaagatgccttacagctggatctcatggaggcatttcctcaactgaagctcctttctctgtggtaactccagctgtgtcaagttgacacaaaactagccagtacagatggacaactgggtatttcccactcagccatgcactacatgatgtctgtaagtcctgtatcttgctcctgatttcccaagaggatgatgatcttggattgtgcatcactgggaatggtggcttgggagcctagtggaggtcttgtggggctgtaccaggctcagggatctcacctacctcatcagaatcctctggcttcccaccctggggcatgtctctgagagcccacagatatggaaacatgcttgcagtccagagccttctgtgtgttctgaggtacctatgagctgtggggctttggccatttcccagtattcatctgtgggatggggtaaaatatctgcctcctcactagatacccccacatcactgtgttggactgtcagaggctgtccactctgcattgtctactacagaggcacacagatggctgtgtggaacagcctctgtaacatacggcatactcttctgtgtccctttggggtgggattctggaggactgtggactagaacattggctagtttcatgtcaacttgacacaagctagactcatctgaaaggagggacttacagcccgtaagatcaggctgtaaggcattttctaattagtgactgatggggagggttcagctcattgtgagtggtgccatccctgggcttgtggtcctgaattttataagaaagcaggctgaataagtcatggataacaagccagtaaggagcatccctccatagcctctgcatcagtttctgtctctaggcatcagccctttttgagttcctttcctgacttcctctggtaacggacttacaatgtggaagtgtaacccaaccaaccctcgcttcctcatgttgcttttggttatggtgtttcatcactacaatagtaaccaaaactcagagtcaaaacccagagagagctgtcgttgggtcagggccaggtgtcctctagcctggctcacagggttcattggaacagggtgtgttgttctgggtgtgggcaggtcccagctatgagggaaatcagtccagggccagccaaacctatgagggtggtgaccgattcagctggagcaataatttgtggttagttttaacggtcagtcgaggggttgagagacgcacagtagccctggtcaaagaatcttggaggagcttcatgttctgtgcgcctttggggttccttatttctctttggagcctcgtgaccaagccagctcagccagtcaacagggtctcaagggagggagtgagtattgaaaaagaaaacagacaacactataacctgactccagcccgtaccgcggctgaagcagctgtttctctcccgcctgcttttatatcattctaggtttatgcaacaaaacaaaacaaaaacaaacaaacaaaacccatggtcagttcttagatcaaagacaaagcaaccaagtaaacaagtagtaaacaaggagaccacacaagagagtgaccaaggatgtgacaagtagtaagcgcaaggatgacacaaggctaacgttaagtggtcagcaaagcagtaaacaaagccccgtggtcattgtttctgacatgccgacttctttgtctgagcccagtgacagatgccagattcctagaagcaccaaaagctctcaacagcctaggtctgtagtaggcccccaccccatgacctcagccagtctgtgggctgaggaagcccagcatactaccctgtagtcctactcaaagcccccatcctcatctgcaaaaggaaaattagtctgctccgcctagtccctctcaggggccagttagagaagcccatagcctgctcaaagatgataagaaaccctgcttcacccttagaagataaagaaggctggctcctgttcctagcgccgaatgtgctcagaagcgtataggctgaagaagcgggcagtgataaattggtaatggggataaccctgacgtggtgtctgggaagtgactggaagcttaaagggggagggtccggtgagaggggtgagttgggaggtgggtcaaaagatcaagttcccagttccctgaggctgagaggttcctatttcagtttgtctgtcagaaaattcaaggtaagcaccgaggtgtttgtagtgacctgggagacagacatacttccagagagtatatatacaggctgggaaaacttgctagtgtccctgtatggagtctgaagctgaggctctgtttggactttagggccctcccagcaccacgccccgtgtgtacttaatgtgctccatctgcctctaacagacttcagtcagagagactattttttctttcattttcacttttccttgccaaggctcatgagagtgtgtgaggaggttcagagcccatggggctcttggcctgaagtttcttgatcaagaaaatggaacctctcccaggatgggggtcggcaccctggagccaggcccctacagacaacaccttcaggctggtgagttcccgagccctttacagcctccaagctccttccggcccaactccagccacagcccaccccagacatttcctgtcccttagctctgtctgggcagctagctcacggggctttatgctgcttggatctgcaaatctctggagataattgataacaacctcaggttgggaggctacaggaaggcaggcctctgcccctccactcccgggcctccactcacagacacctactatggctctctttaaagggcaggaggtggtgctatgagcatagtagcccttggcagaaccctggctgtctctggacaggccctgtagcaagaggccaaccataggtatctctgtccctgaggataagcaccctcacagagtggagacagagatcagggcaggctagcaggagccagacagagtgtctatcctgtttgctcaagtaggatatactaaccatcagtcagctgtccctaggattctgaagagcctgttcccagccccagctgaccctgctgcctctcaggtcttacactgtcaggcaatgaaggcagaaggtaggttaagcaggcctgggcccgagcccctcctacagagacactgaagttgtgctgtttcctcgcttcaagaagcagagcatgcactgagggcctggaccagcctggtgggggggttggggagggagagccatagcgatggaggtagtcctctcctccagcactcatctcctctcccaggtgccttgtgtcttccttttgaacttgctgcagcgcatctctgcccagccctcatgcagacaggaggagttccttgtgggagacgagtgctgccccatgtgcaacccaggtgggagttcccaggaggcagtgctgtgccagggaggaactcctgtcctgagcctctgggcctctgggtcctcagtccaacggctgtacagtgttcagttcagggatagtcctcggtgtctggaacctttgaagttcactgcctggggtgggcccggggggtagggcaggctttataaccagagactgagactgaaagtgggctggggtcagagccagttctaagggatttaggaagccccatctctgtgtttctgaattgttcatagagggcagacagaaggccaacaagtcctgtggggctttagttgtggttggtgccatacttgctagacccatgtgagggtacagggaagggaaggtttctgtggattaacccccaaccctgctgaggaactgtgggtcctggctgcaggttaccatgtgaagcaggtctgcagtgagcatacaggcacagtgtgtgccccctgtcccccacagacatataccgcccatgcaaatggcctgagcaagtgtctgccctgcggagtctgtgatccaggtaggagcacctgaggaggtggaggtggggtctgctggagcacttaggctcaggcattggttctagaagagggcaactcatggagggaaccgcagcctgaccttcctgctattgtgggcaggttctcagggtgtgtctcccctccccccccccatccccatcactgagattctattgcctgcttctttttctccctgtctatctggttcatgtgggtaatgagaggttctttcctgcttcagtttccctgcccgtgaaggaactcttacatgcgttgggacatcactggggatcaatgtggccattatatatatatatttttcccttcatatgaaggaacccaggaaaagctcactcgtagactgatggctgcctgggcctgggcagatttggatggggacacaggtcctggaatattcgaagctgtaaggtagccagcgcttctgttcccaccatagccccacgctctccatacactagccttgggtgactctggatttattacagtgcccgcaataaatcgggcggcctcacactccccacaaggataaccccgtacttactcatagtgtgtgaggagggttgtcctcaccccttactgagggtgaccccgtgtctatcacagtgtgcaaatggagatgacctcacccttatagaaggggaacctctatactcacacagagtgccctcatggggtcagagtgactctgtacctattcgcacaattcccatacacagtcggctcagacctggaggccgaagactgctgattcccatggacgggatactgagatcccaagagtcaccagggcactctgctggatggcagagcctaccaactccacacttccagggctatgggcacatagattggaagtcctgcttcctggagtgggagaaaacagaggcaaggacaattcagacttggtcaaaacccaggtcctgggcatcaaaccactctgtgaccctatcagccctcaaccaagccccctgctcagagccattgtgctatgcctggctccccctataggacaaacctggtaccacatgtgcaggtggtaggtagcctctggcaagtgaagctgtgcagaatcggacccgggtacactgggacgactggaggaagggtgctcccccaaatcccgtgctggtgctcccatggccttgtctctggtggcagacatgggcctgctgacctggcaggagtgctccagctggaaggacactgtgtgcagatgcatcccaggctacttctgtgagaaccaggatgggagccactgttccacatgcttgcagcacaccacctgccctccagggcagagggtagagaagagaggtgagctgtctaactgaaggttcttttcggaggccacccttgttccagtaagcccgctgcctagggtctagaaaacctccagcttcaggatttcagaaaggagcagaggagaaatcttggccaaccctagggcacccaccccagaccagtcctggcagcaagagaggaaagagtgctataggttggcatgacaggaggggagaggggagcacaggggggcagggaaaagctgaactcaaagaatctggaagatccagaaaggttttctggtaagagtcaggaagaggacagagggcggagaaaacaaaggggagctggaacctctccgttggctcccacttctggtctaacctcagctatccaacatcgggtctaacctcagctattccacctcagctccaatgcttcacgggagccagacttgtaaactctgcccaaccccactattcacctaaatgtgagggctgcctttgccttctgcctggcatctggccaggctacccaaagggtgtgtgggttgaagacccctgggttattacatcaggccctttccatgtccaggatgccctaaaactacccagccccttctcacacagtctcacagtgccatctaccaccacagctccctctaccagctacagagtattatgggttgtgaggctccagaacagacagctcccaggccccactccagggaagcccagattcctgcaagcctgaacccagtactcctctgtttgcccctcttcacttcccagggactcacgaccaggacactgtatgtgctgactgcctaacagggaccttctcacttggagggactcaggaggaatgcctgccctggaccaagtaggtgactagcatgctggggaaaggactactctccctctggaagatgagtagccaaacccagctgagctgcatcctgggtaggcagagcaatatggagccttagctaggattccacaggctgtagccagttcccactctatgactgcaggaccaagaagtcaagggtatgggacttccctacatttctgtagttggggctggggtgctgattgtaagggctgtcttagtcagggtttctatggctgtgaagagacaccatgaccacagcaactctttacagaggaaaacatttaattgggactggcttaaagttcagagggttagcccattgtcatcagggagggaagcatggtgacacacaggaagacatggtgctagagatgcagttgggagttctacatctggatcggcaggcagcaagaagagagagtgacactggggctggcttgagcatctgaaaccccaaagtcccatgacacatttcctccaaaagtccacatctaccccaacaaggaggtgttcctaatagtgccactccctatgagcctgtggggggggcattttcattcaaaccaccatcatgatgttctctggtgaggccccttctccacctgagccaggatcccttcagtatggatctcagaccttagagctaacctgagagcttgggatctctgaagatagctaggtttccttgggtgatgcccagagaaggacatcagctcatcttctctatcccatctctcttcactgaggtcagtcagtccccagctttgacaccagcacccctccctttctcactccctccttccctcctcctcttctttttggcttccatttctaccctgctccttcagcccccctcctttctccatttccccataaaggctttgaaatctgtaacagacctgagtcctatctcagagctgttgtaccagccgataggctctgagttgcatggaccctgcctcgctccccgacattgcccagtctgctgacctgtctccacctgtttcccaccatgtcccatggctgctctctcctagctgcagtgcatttcaacaggaagtaagacgtgggaccaacagcacagacaccacctgctcctcccaggtcgtctactacgttgtgtccatccttttgccacttgtgatagtgggagttgggatagctggattcctcatctgcacgcgaagacacctgcacaccagtgagcaacaacccatcttctggggctcaggactccaggaggggtcccagggtctttgtagagtctggatctacagtggctagtggtagagcccttcctcagagcccagctctcaggtggcctcccgaggaccctccattcttccctctcccctccctctctcccttctttccttcctttcattgtccagtctcatctgtgtcctgctgagctgagctctagagaccagcttgtagaccaaatcagacctgggaagctctggtctatgctttagggagtcaaaaaacaatggccaggcaggctactctctgccagtgaggaagcatacctctgtgtgctcaaccctgggtgctcctagcgcaggaggcctctttcctaggctctgcaggtgggccaggtagcctatgcccctttctgcccaagttaagcccccgctcatggtagtgagcaggttccccaactctttggcctccaggaatgtgggcagggatctgttcttttacctggtgggcctcctgtgggttttgacacatgtccaaagctcacttcttctgttagagagggtcagacttgggaggtagatcacacagctggaatcccagaatgtgggtttttcattgctgtgtgcccgtctccctcccctcttgcttcagcctctcccatgacttgatgttcttgtgttacaggctcagtggccaaggagctggagcctttccaggtataactgggtcggggaggaagttccaactggcatatgcttatggaagccaactccatagtctacagctaagcgttacatgttcccaagagccatgtagtcccctgcttggtgtctgagaggcaggagtttaccttgcgtttctttggcagcaggaacaacaggagaacaccatcaggtttccagtcaccgaggttgggtttgctgagaccgaggaggagacagcctccaactgaacaaattctgggtgacaagacaccgaggagacgttggtgggaagtttccatatgctattgggacatggcagatgccctggctggttcatcatcacacaacagtggatatgtggtcatggcccagggtctaggagttgctttgccattctttttttttttttcgagacagagtttctctgtgtaaccctggctgtcctggaactcactttgtagaccaggctggcctcgaactcagaaatcctcctgcctctgcctcctgagtgctgggattaaaggcatgcaccaacatgcccagctgctttgccattcttagtgttaaatgggtgcatcttctcccaaccaaacactaagaggtggtgatccaaagtctatactagtgacagctaccactgaccctatgtcttacttcccagctcttccagtcagcttataacagctctgcctaggcctgtaacctagcctaaccagctcagcctataacctaggcctctgcctgtcctggaaatgttaaacctaggcctgcttagtcagagggctgctgagcactgcctcctggggccggagtacatgtgaggagtcatgaatatggcattattatagactttactttgacatttctggggctggaatcttgcctgattcaggcaagtgcttttattcctgagctgcattctcaagattctgtttttacctgaggcaaactcacatgatcatctgggccaactgtggactcctgtatcttgggcaagccttaaacttgacccttctttttttttattagatattttcttcatttacatttcaaatgctatcccaaaagtccctgtacactacccctgccctgttccccaacccacccactcctgcttcctggccctggcattcctttatactggggcatataatattcgcaagaccaagggcctctcctcccactgttggccgagtaggccatcttctgctacatatgcaactagagacacagctctggggggtactggtcagttcatattgttgttcctcttatagggttgcagaccccttccacttcttgtgtactttctctagctctttcattgggggccctgtgttccatccaatagatgactaagcatccacttctgtatttgccagacactgtcatagcctcataagagacagctatatcagggtcctgtcaacaaaatcttgctgggatatgcaatagtgtctgggtttggtggttgtttatgggatggatccccaggtggggcagtctctggatggtccttccttccatctcagctccaaactttgtctttgtaactccttccatgggcattttgttccccattctaagaaggaatgaagtatccacactttggtcttccttcttcttgagtttcatgtgttttgcaaattgtatcttgggtatcctaggtttctgggctaatatccacttatcagtgagtgcatataatgtgtgttcttttgtgattggatgatatcctccagatccatccatttgcctaagaatttcataaattcattgtttttttaatagttgagtagtactccattgtgtaaatgtaccacattttctgtatccattcctctgttgagggacatctgggttctttccagcttctggctattataaataaggctgctataaacatagtggagcatgtgtccttcttaccagttggaacaccttctgggaatgtgcccaagacaggtattgctggatcttccggtccaatctatgtccaatttctgaggaaccgccagactgatttccagagtggttttaccagcttgcaatcccaccagcagtggaagagtgttcctctttctccacatccttgccagcatctgctgtcacctgaatttgtgattttagccattctgaccggtatgagatggaatctcggggttgttttcacttgtattttcctgatgattaaggatgttgaacattttttaggtgcttctcagcatttggtattcctcagttgagaattctttgtttagctctgtaccccatttttaatagggttatttgattttctggagaccaccttcttgagttctttgtatatattggatattagtcccctatcagatttaggattggtaaagttcctttcccaatctgttggtggtctttttgtcttgacagtgtcttttgctttatacaagctttgcaattttatgaggtcccatttgtattaaggaaaagtaattgttgcttcctgttatttttgttattagagttgggattctgttcttgtggctattttctttttttttttcttttcttttctttcctcttttcttttcttttcttttcttttcttttcttttcttttcctctctctctctctctctctctctctctctctctctctctctctctctctctctccccctccctcccccctctcttctttttttcaagacagggtttctctgtgtagccctggctgtcctggaactcactttgtagaccaggatggcctcaaactcagaaatccgcctgcctctgcctccaaagtgctgggagtaaaggtgtgcgccaccactgcctggtgcggctatcttcttttaggtttcttgatttactttcttgcattttctagggtgtaattcccctccttgtgttggtgttttccatttattatccttttgaagggctggatttgtggaaagatattgtgtgaatttggttttgtcatggaatactttggtttctccatctatggtaattgagagttttgttgggtatagtagcctgggctggcatttgtgttctcttagtgtctgtatgacatctgtccaggatcttctagctttcatagtctctggtgagaagtttggtgtaattctaataggtctgcctttatatgttacttggcctttttcccttactgcttttaacattctatctttatttagtgcatttgttgttctgattattatgtgtcgggaggaatttcttttctagtccagtctgcttggagttctgtaggcttctcgtatgttcatgggcatctctttctttaggtatgggaagtgttcttctataattttattgaagatatttattggccctttaagttgaaaatcttcattcttctcatctattatccttaggtttggtcttctcactgtgtcctggatgttgacccttctacctctgctttccaaataacactgtgattacctacatgatcctgcaaactgaggggtggggagtggggctccagtgctttctattcttctcgtgtgtgtgtgtgtgtgtgtgtgtgtgtgtgtgtgtgtgttttaccccatttttctatcagcctcgggaaaatcaaattttaccctctcactgtttcaccagccctagagaatttacatgctcagagaaaagtctgcagagggattgaacaatcgcggactccacacctctcttcagtgtacctgaccagtccaagctggcctttgacactggtcccttagtagctagccatcttgagctaacctggacttcaccaatttggctagattagcctaccattgagccctgagccccagatgtccccttggctgtcttcttggtattgggattaaggtactatgttaagcatttaaagtggattctgtggataaacttagcttcaagaacacaggtccttatgctgcggagcatgtactatagcaattgaaccatccctctggctttgcatgaatttataacttatagaaaataaatatttgccgggagtggtggcgcatgcctttaatcccagcactcaggaggcagaggcaggcagatttctgagttcaaggccagcctggtctacaaagtgagttccagaacagccagggctacacagagaaaccctgttcaaaaatacaaaaacaaaaacaaaaacaaaaacaaaaaaacaaacaaaaaacctgaaaataaatatttttgttatatgttctgtctctgtcttgtgtcttattaaacatctgtctgtcctgtgagagtgatagtgattgctccaagttaactatgttctcatgtatgccacatagtcgcttggtgaggggcttccactggcaggaggtgcagtcaccctcaataatatcacagcaaccacaggtttttttcatcctgcttggtgattggtttcatcattgccttattttctggctccggtgtttctgtgggcatcctttccaataggattctttgaatatctcccatcacctcatgggagtgactgcccatcaggccaaatgctgtgcttcaggctcacctgttcctctacacctgtcctggcatctcccaagaactgtttgaagccagcgaccatcaactgctacaactgtgagcagaaacacagccttcctccttgaactattcctctcaggtgcttgccacagcagtggaaagcctcattaggctacatgtcacccctctgtatatctgtcattttatctccttcttagtcactgttgtgtggtgaagagacaacacgaacaagacaactcttaaatattacaaacaaacaaacaaacaaacattttatcatgggcttgctcacagtttcagagggctgtcatcttggcagaaaggagacaggtatggtattggagtaatagctgagaactttatatcctcatctacagacagcagctctctctctctctctctctctctctctctctctctctctctctcacacacacacacacacacacatatacacacacacacagagggaggggggaccggtcctgatgtgggcttttgaaacctcaaagcccacccccagcgatacaccttctcctgtaaggccacgcctcctaatccttcccaagcagttccactacctgacagctaagcattcaaacatatgaccttatggggattttcgttcaaaccaccacaatttctatttatctttctcatctgtttgtagattatccatccatcttctctttatcatctatcttttctttttttaaaagagttatttatttattatatgtaagtacactgtagctgtcttcagactctccagaagagggtgtcagatcttgttatggatggttgtgagccaccatgtggttgctggagtttgaactcatgaccttcagaagagcagtcaatgctcttaaccactgagccatctctccagcctccatctatcttttcttatcttccacgtgtctatcttctttacaccatgtaatgatgtgactcacactctcattagcccatggaacacagagaggaacctgtatgctaatgctagtggttaaggaagttgagttaggaggcagaagtgggcaggttgtacgcgtgcctgatgtttgctgtatctggttggttgtaattacagtacataacgagactgcattcatgtctcacaaagaacatatcagcacttgaacccgtgatcacgaacagggtctccagaaacacagagggctctgtccaccaaggaaccacacaaactttgggtgagcgttcacatgcatgagtacagtttggcctgatgtagccttcctgagtcttaaccacacagtaggcaccgacctacctggtctgttttcttcagatagtctcccagcaaacaaacggaggcaaaaccattcagggtgacatggagccttatgtggggagactctgctatcagcacccagaacttgcttgatggccctggagtccatttgagataaatcaggtcttgactggcattgctttttctctggtcactttctaaacccttcattctgatgaaattgcaggggtcagttttctgccacccagccccatacatactttgcctgtaagtctccagtaaaatgcccattgtattgttctcgatctgttggcctctgactttgctctgactacatctagggcctggtcttcaaacacaaggcccaggttgccttggaataacatcgataatggagctgtgaattttaaaatgagatgctagaattaccgggagatgtcagagcggttgttaaacaagatttgggcagagtgggcttgagagatgctcttcttgctgctgacagagtgggtggacattcggagcagggacatgagcagggccggggatactgccaccttctctgccactgcaggtccctcttctctctgttctgctctccttcagcaacacagggtgtgcatgctcagccaagcacaggcagagtccatgtttgtcgtccccccccacacacacaccgaataaatgggtgcctgggcagctgcatggagccctgttccactgttccttgagatggttatctgagggtgcagaggaccctggggctgcccggtctgcatcagcactggagccaggggtcaccaggaccagtaccttcaagccacacttacctgagaggggcagtgggacccttaaggcagcctgttctttgtagccagcggcccacaatagatgtctatcctgaacatggtttcattctgatagcttgacatctggaggctctcttatccttttgggaggagccaactcttaattcaggaaccggtgacctgggagtttgcaatttatgttcagactggccagtctgaagtccaccggcatgagtgacatttctcagtgcttggctcaaacacctgacaggaaaccatgtgaggaagaaggggttatttttgttcctggtttcaggtccatcatggtgggaaagacggatgtgtgagctggctggcgtgtgcagtgaggacactcagcaacggacgctggcgctcagcttccttcctgagctttattcagacccttgcccgtgggaggatgctccctcgaattaggctgggtctacccacctcaacttggttcatttccatgatgattctaaatcccatcaagttaataatcaatgttaaccaaattgcactgttggacttagagccggaccctgtgcccaacaagctcagtttggactccagcccctgaggaggcgatttaagttttttttttttaatttttaattttttgaaaagctaaattgcttgcctgaatcatggtagtgtctgcatcgtgagccacaggacaaggctgcattgtctcttcaggtgtatatctagggcaaccaggcaacactaggccaccatgctgtgtttccagcccagcttcgtctgatatgtaactttccctgagagataggagcgaatgtctaattaccccagattgggtgttgaagacctttgccttgcaggtcctgcccctggggcctctgaggtgccgcctcagaagtgtcccaggaatgaggtgtgtccacaggagcttcagggatgggctaagggatggcaggtgggaaggaaggtgccaaggttcatctgaggcctaggaagtggtgagggctggactcactagaatggagtctgcagatggccacactgggaaaggggacagatatccagtgaccccagcaagtccatctttctagtcgtgatttgaagttgaggttaaagcagaagccaaagttatgcataactttgaagcaaaattattcagcagccctgggtaaggtgcggtcccacccatcaccgcctctcctgtgaagtcgcatgacaaattggaagtctctttccagaacagtttctcttcttgctggtccatgctctaggctttcttctctcaagggatgagaattctgaggtaattccagtcccctggggtctactatttcaatagtctgagagtcaatgagaggaacaaatgagtctttagaatatcgtcttctctgtcacaccacctagaggtgtcctctgaggcccttataccccagaccaatggtccctagagccccagagctaagattggaccctatagtccagaatctgtaaaatcacctacatcaaccaacccacaccatgtcttcagcttgtgaccccagagttcatgacggtcaaccacgattggtccctgtacctcagaatctggaaaactatcatctgtacaaacctagcctatgcctgctcattgaccttgtctggcctttcccatggaaactacatgaaggctctcacctgtacggaccttggtccttctgcttactgataatccctggggcttccccgggtggccttggtggcatggaggaagggttataacaagcctgcatctaggtggtggtggtttcccctgatctgcagcctttgcagcctgcaccatggtaatacctgcactgtgagacaggtcacagggcaagactatgctgtcttagccacagtggatggctagagagatagaacaaccttagggccatagggctgggtcttcagcctagcttctcttcttcatgtattgtgtgagctttgtgtagaaaacatgagccctagatagggcactgaagacaaaccaaaaagaagatactacctaggtctagcttaggtaactggatggaagtcgctcctctcagctgccaggatccctaaccctggatctcagggctgtgtgtgaagcacttggggccgggctgaagcctccccataacaggtttccgctccaggcagcccctgtgggtcccacctgctgtggggcctctgaagagacctgtcttggaaatgttttgggagtgtggtgtggcccacagaagctggtaggaatggggcaaggaaccggcgcctggtgccagaggtcaacagggaggcaagagggaaggaaagcggggagcctcacctgaggcctgggcaggactcaccagagtgtgtggagtctgcagaatgccatgactgaggcctagggcatcagctccagagactgggcctgtgcaagagactgactcttggtttgttcctagcctatgagccccagcaactcagctgcttagcatctctgcagagtgcctgagcccagtctgccaaggtaactactgtagtggtggtaggtcagcatcagccctgaaggcttaggggtctataaagcaaagtggaagtggaggggtacaggtagctgcaggggagacacccaggatgggacagtaggcttcaggctcctcatcccattccaaggtttccccttggaattcccccataaacagccttaccctcttctgtgaggattcatcatctacacaggataaatgaatggattactgagacctgggtatcctgtcaggtgtctggagaggctgtgcacatgaagtagggcttctagtaaacacacacacacacacacacacacacacacacagagttcacaccggacaaactgggaacaacagaacataaattaataacaacagccaggatcaaagcacttgactacagtgagaagccccgggcaatgcattaggaactggaagaaagagagtgttttgctgcagtagatgactagcttcactaaaaaggaggccagaatctttgctacccctccccagccattaaaaaaaaaaaaagcgcagaatttggacaaccatgaagggcaaaagtgggtgagaaggaagagaaggaagatgttcccagcctgaggtgtcttctgactccattttatcataaatacagggaaaggggtggggctggtgagctggtttagggaggaaaaggctcttgctccaagctggtggcctgagtttaatccctggaacccacatgatttaaggcaaaaaccaatttctccaacttgtcctgtgatctctgcatgtgagctgtggcccatgctcacatgtacacagacacacaggctcacaaatacacagacacacaggctcacatgtacacagacacacaggctcacatgtacacagacacacaggctcacacgtacacagacacacaggctcacacgtacacagacacacaggctcacacgtacacagacacacaggctcacacgtacacagacacacaggctcacacgtacacagacacacagcctcacaagtacacagacacacaggctcacaagtacacagacacacaggctcacatgtacacagacacacaggctcacacgtacacagacacacaggctcacatgtacacagacacacagcctcacatgtacacagacacacaggctcacatgtacacagacacacaggctcacacgtacacagacacacaggctcacacgtacacagacacacagcctcacacgtacacagacacacaggcccacatgtacacagacacacagcctcacatgtacacagacacacaggctcacacgtacacagacacacaggctcacataaatataatactccttcaagttgtcctgtgatctctggctggcactattgataacactgtgcccagtcccacccagccccaccccaactccatctctactgtacaaacacccttatcagcagagaagggtgcaggtgcccagccccttgccctgccagagctgcaaccatcatggtgctacctccactgcttctaaatgagggtcacaggcaggggccttctcagtggggctggcttcccccaacccttttcctccagagataggaccatgaagtagagcctgggaaagctcgagatagaagtgcatagggtttttctccatgagctggaaagccagacaaggccgtgggacctagggagaagtttgaggtggaggctgggagggatggggacagagggaggactgcagcctgtcacctgaactcttggatggaagaggaactctgccaccatcatctgatagctgccagtctttgcttcccatttcttagacagtcccttgagtgtggaagttgtcagaatccagagtcagcagtgtcaagtaggttgagaaagagtggctctcccctcactccgcattgcctcagagcaatgaccacaagcgcttggccagaaccacagagccttgtatggaaacactgctgtgagaagccggcccagtcctgcgtgttcaggctcaggctggtgtccccctcattagtaatccttgtgggcagagattatggcttcatgggctgtaacagtgctcactttatctttaagaacctccctggccccagctgccttgaatacggacactgtttactgctgtacatattcaatcccttggaatgttccatcatgtccaaactcctggagaatggctctgtggtcatcaggttaacaagactgcccgctgacccgggcttatccctgtaccgggttcaccgaggcagcaaaggggtatggagtcggagtcagcaatggatcgatcgattgatcgatcggggtcaaaactgctttacctttggcaattctgtcagcgattgcatggccaaaagctgcttactttcttttttttttttttttgggcagttttctgtctttaactctgctattctgtggccaaaagccactgacttctgctaacttaacaccatgctgatactgcaggggatttaagaaagaagtcttagtttctctctgggtcaagggcccctgctgggcagaggagagacttggagtttgttaactcttcatgagccagagagaaaagaaaaggaagaaagagaattcaagcacacacagagacacacatgaacacacacacaaacacacacaggacacacaaacacacacatgcacacacacacacaaacacacacatgcacacacacacacaaacacacacatgcacacaaacacacacagacacacaaacacacacatgcacacacacacacaaacacacaaacacacataaacacacacagacacacaaacacacacagacacacaaacacacacacacatacacacatacatacacacacacttacactttggctgggcccgactacctgtctcaacaaatccacaagaattcatgcaaacttacatacacacacctacacgagtatgtatgtacacacatatagacagacatatgcatatatacatttggtggatggggctcagccccacacgccacacactttattcctttgctcagcctctcttatattttcttagacaaaggttctctagaaaattacctcatagatagaatgttacacaaaggggcttacagaaggatgccaatagtcagttcaaagcagtcatatctgacgagtgggaaggacctgtcatgcccatttgggcacagggaggcattccccagcccctagttatttctggctatttttatttctggttaattgagtttggagtcctgcagatcccctgctgggaccaggagctgaattatgaagtttcaaaagttttgaaaaatgtgaaagtttcacactctgagatgccagactttgactttggctgtcaatgaaaaggattggtggacttctaaagcaaagaatcccagttgttaaatgttgttgccttgtttctctggttttgctttggctttatgtgtcttgtcttgtgtatctggtccatatttatgtgttctgatttggggccgtatcaccgccacacaatggtccctataaggcaggtgctgcctgtgcggccccacttcctgcccaggtacagctggtggcaaggctgagccacgggatctgtgttgacctctgacctctgacagtactgctgtgattttggtgg

SEQ ID NO: 542 - DNA, 834 bp, Mus musculus
cagacatataccgcccatgcaaatggcctgagcaagtgtctgccctgcggagtctgtgatccagacatgggcctgctgacctggcaggagtgctccagctggaaggacactgtgtgcagatgcatcccaggctacttctgtgagaaccaggatgggagccactgttccacatgcttgcagcacaccacctgccctccagggcagagggtagagaagagagggactcacgaccaggacactgtatgtgctgactgcctaacagggaccttctcacttggagggactcaggaggaatgcctgccctggaccaactgcagtgcatttcaacaggaagtaagacgtgggaccaacagcacagacaccacctgctcctcccaggtcgtctactacgttgtgtccatccttttgccacttgtgatagtgggagttgggatagctggattcctcatctgcacgcgaagacacctgcacaccagctcagtggccaaggagctggagcctttccagcaggaacaacaggagaacaccatcaggtttccagtcaccgaggttgggtttgctgagaccgaggaggagacagcctccaactgaacaaattctgggtgacaagacaccgaggagacgttggtgggaagtttccatatgctattgggacatggcagatgccctggctggttcatcatcacacaacagtggatatgtggtcatggcccagggtctaggagttgctttgccattctttttttttttttcgagacagagtttctctgttgtagccctggctgtcctggaactcactttgtagaccaggatggcctcaaactcagaaatccg

SEQ ID NO: 543 - protein, 194 aa, Mus musculus
QTYTAHANGLSKCLPCGVCDPDMGLLTWQECSSWKDTVCRCIPGYFCENQDGSHCSTCLQHTTCPPGQRVEKRGTHDQDTVCADCLTGTFSLGGTQEECLPWTNCSAFQQEVRRGTNSTDTTCSSQVVYYVVSILLPLVIVGVGIAGFLICTRRHLHTSSVAKELEPFQQEQQENTIRFPVTEVGFAETEEETN

SEQ ID NO: 544 - DNA, 28049 bp, Homo sapiens
  misc_feature (1)...(28049): n = A,T,C or G
gaggccaggcccgggcaggtgcctgggctggggctgctcctggccaggctggaagactgtcagatggaggacaggtcaggtggtcggaaagctggggacagggagggagcaggtttgacggagggacgtatgggcaggctcctcctcccggtcaggtcccacgtgaccccccagccacgcctacccacatcgccctgctggaggccgggggcggggggagcggggagtggggggtgtggggggtgaggggggtgggggtgggggtggccnnnnnnnnnnnnnnnnnnnnatagatctctctatttatatatatatatatataaaaggttctttagcagttaaatagattccaatatgaacgtctcccaggacaaagctgcgtctcgcctctgggtcacacgcatctgtgcggctggggtgtatgtgccgcgtcacagcagtaccatataaatacgttgatttgaacgcagtttacacctgtggtggtggcccaggcagtcagttagaggtgcggggccgtgcttcttctggccctggcctccaattggctgccgggcgtgggaaagcgtgcaccactgcctggcgcccataaagacgcctccaccacctgcgccgccgccgcctcccggccgccctccgccccgcgcgctcgttgaggccggtgctccagagtgaagagcgtggcggtgcggcggtagcgcagggccctcctgcggggccaggcaggggcgggtgggcgctccttgccacctttctgctctccctgctgtccgagaagttcgtgcggtgccagcccagctcccagctggggacagaacaggaaacgtccccggcgagcctggcgggggtggcggcaggggtgtctgtcgcctgcgctgggcaggacgcgcgtcctaccggcctcccactccgcgggcctcaccagccacctcattcccggagcccgggccgccgagagcgccgcggatggacctcagggaaggcctggcgcgccgcctccgggaagccttccggccttctccctccaccgagtactggggagtctcaggccacggtgaatgaagagcaacgggccggagagacctcggcctctgcccaggagcagcgcccagcaaccccgcccacaggggacccggtggacgccctggtggccactttgccaggctccccatctcccagcgaaccagagaggatttccgttcccctcctgcttggtgcctagcgccagggcggggcgtgggctgagcagcccctcccatggagggagcggccagtctacatattggaggtggggctctggggaaagggtgttgttaggaaggcggtttgaggcagcgggaggtggggatgcgcccggcggggaggggcaggtgtgtggggagggcctggggagcgcctccccagccgggcagcgcttccccagccaggccccgcagctggaccccggctccgtccagcctgggaaaggactccacggtttatgctgaagtggtggtggggtgggtgaacgctgcgcaatggaagggcatggccctgtgctaattgccccggggtgtggggctgtggaggcactgcgggggggatgtgctgtgtcagttgggcaatggcggccaactgtggcgtgcaggccttggagctgcccctccatggagctttaataaaggcactagccctgcaatttctgcctgagtttctggcccacagcttggccgactgcagcccctgagattggaggcttctgctcaagacgtgggcagggagctcggggctccctgggctggggccctgccccgctggcctctaccctggcccctgctggaaagcccgtcagggctgctctgagctggggacagctcctccctgcccacagcaatctgggggagccccggtttgtccagtgcccctgtgagccctgctgtgtaccagccacctgtgggagtgtccgccagtcacctcccaatagctcgggaggcagagcgacatgactccattttagagatgagcaaacggggctcctgcactctgggaccatgacagagacacaggaagtgagagtgggctgaggccctgcagcagtgggggccggccttggaccgtgatccaacccgaccatggctgcccaacccccacgggctcacctggcccctcatcgaaccatgtattacccgaataatttattctagtgtctgggcccagccccgtgtccctcactgacaaccagaccatggagggcagcccttgtgttttcccagggggaggggagggaggagggggtggattcttaaagggctgcagtgagtgtggccccaaatgcacacccagggttaggcacgcaggtgatggcacagggagcccaggttctaggaagtggcacctgcggccggggaggcagggcctggattttgctgccccctggtggctagcggcctgtccaggcaaaaggcttggacctgcagcccctgtggctcagaggaagagacagaggaagagacagacagaggtctgaggtctcccatcagaagtctcagctcccaaggcaaattcagaggtggagggtcccttggccctgtcccagctctggcagggcggccccccacgtcctggcctgctgccaggggtcgcgcccacagccctgcaccgagcagggaaggcccaggcctgggtgggtctttccgcaggatcctgggatgttgcttaggggaagccgagaccagacgggcagtcacctgtctgggaaagcaccaggccctggccgggtgcgatggatcacgcctgtcatcccagcagtgtgggaggccgaggcgggaagatcacgaggtcaggagatcgagaccatcctggctaacacggtgaaaccccatctctactaaaaatacaaaaaatcagccttgcatggcgacgggcgcctgtagtcccagctactccggaggctgaggcaggagaatggcgtgaacccaggaggcggagcttgcagtgagccaagatcgcgctgttgcactccggcctgggtgacagagccagactcaaaaaaaaaaaaacaaaacacaaaaaacaaaaaggaaagcactaggccctgcggaagtccccatggtgacattcacgtcctggccacgtgggcgggtgtaggggagggaccgcagggaggcggaagtccttgttttttcctgcagtcggcccaggcaggacctgagcagcctgaagccatgagtcgctgccactgctctttctgtgcctggtgcagccccagctcatggggtctgggccgcctctgatcccatgccccccacttcacacttggggttctggcttccccgctgtgagcctgtctctcctccgtgggacaggccagcctgggcagccatccctgtacccactgcccagcatatagtgggtgcctcataaatgtgggctgaacagagcctgcccctggggccccaccctcactgccaggcatacagcaggtgcctcataaatgtgggctgaacagatcctgcccatgggccccccgacttccagacataaagtaggtgctacataaatgcaggccaaacagaatctaccctgggggcctccacttccctttgatgggggcagagaccctctgccgggcagcggccacccagtgcctgggacaggtgcccccttctcccaccctggcctatcttggggcatctgagggaggacagggctgtgccccccacttcatcctcgagggtctggcttccccacctgtgagcttgtctctcctccgtgggaggagcagcaccgtcgttttcactttccgtgatgaccactgagtgagagaagatgacggcagctcctgcgtttaaaaaggaaccatccgcgtaactgccgcaggcagggcccgtgctcgggcagtgaggcctcggccctgagaaggcccggaccccacaggcctggccctggctgagagggagttggagtcccccgcctggggcagcccctctgcacctggggtggtggagcaggagcttggctgcaggcggggctttcctcccagctctgggagccgcttcgctgcaaacgctgtgactgcaacctccgccacccaggttcaagcgattctcccgcctcagcctcccgagtagctgggattacaaggcacctgacaccatgcccagttaatttttgtattcttcctagagacggggtttcaccatgttactcaggatggtctcaaactcctgatctcagatgatccgcacgcctccacctcccaaagtgctgggattacaggcgtgagccaccatgctcggcctaggtgacttttcatggggagataacacacaggcatggtgagcagcgtggcagaggacctgtgtgcagggccctgtctcccgccggggaatccttcatctgggaaatctccgctgcgggacagggatgctgtgtcgtcaggacgcagcgtctctccagggcacccgggcctcctctgagcctctttgcgctctttggctgcgtgctttctttcctgtggcaaaaggtacatgacgttttattgaccatttcagccattggcaagtgtgcaaatcagtggctttagtccattcgcaatgcagctggaccccaccctttcctgattcccgcaggccagggctgagggcggggaggggcctgtgcagcagcctgagaccggctgtccaatggcagagcttccttctgggaaagccatgggtcccctggggccccatgctggaaccccagcaatggtggttcacgtgtctctccatctcacttcccgtgcaaaagcgacacaggcgggtacaaacccaaacagtgcagacatggaggagacagaaggtgaaaatggtttctgagcccctccagccgccctctggggacaccagcctggcgttcttcagacacaagcactccctgcagccaggaagaggaggaggcagccgggtcttgggcgcagagggaccaccctgtgaggacatagggagcaggtaccatctgcaggcccaggagggaaccaaccccacctgcccctgcatcttggacttccagcccccagaaccatgacaccattgtgtttccatttcttgagcccccaagtctgtggccctttgctttgttttgacaccccagcaacatgagccccttcccaacccctccccagccctggccccatcatccttgacctctctctccctgcaggttagatctgcctgtcccagaatttcacctgaatcacaaagcgtggcgcctcggggcctggctcccttcacgtggcctgatgtctgcatattcatccgccgtgcagtgtgtgtccacggttcattttgtgttgccacggagcatctcattgtgtggccctagcccagtgtgttaatccgttcacctgctggtgggtgttgcagtggtttccagctcttggttatcaccgagaaagtgactgtgaacttccgcacacacgttttgctgaggacaactccttccatttcacttggttattaggagtggagttgctgggtcctagggaaggtgtgtgtttctctctaaaagaatttgccaaaccgatgtccaaagctgtaccatttcaggctcctgcctgaaatcatgctgtgattgtcatttcagggtccacgtctgacaagtccaccgtggctgcccttctgggcctgttgctgctgactcacgttcccacggccacctttccctgcgtctggacgtagtagcaatttctcgttggatgtggacattgtgctgtgaccgctttgatcacctggcatttttgttgggttgtttttggccttcctttaaaggacgctgcgctgtgttctgcgtggagttcagctccttgctcttcactttggtcttcgtgtggctggttctgaagcctctcagagcaggtccagcccagcctttcctgcaggaagagtccagccccactcccaggacgggccctgctgggtggctgccaacagcccaggatcctccaggactctccccctggcggttggaactcctgtctcccacctgtgagtcccaggggccgggggtccacagccccctagggtcccatccatgctgaagagtccaccttccacatccatggcgcctgactccggaggcctcagaggccctcaggcagccttctggagctttctgtctgtgcagttccctcccttctggagctctgcctgccaggtccctctgcggatgtctccctgagcactgacctccttctcctcagcccgccaggactgctggacctgcctggatgcccgcccctgctcggccatcctcaatgggcctccaccccagggctggggtgacccgggctgaaaacagttcatcctgagtttcagtctcgagctttcgtggcaggagggaaactgctggctgtgttactccacggcggctggaacggacgggaccagctcccttcagaggggcacttcggttggttctagaattctcctttgctatgaaggctgccgggcacattccacaccagccaccctccacctcgcatgtgcgtttatcgatgaaacgccacagtgggacctcctggatcaaatagtgcaatgatgtaaacgcttagtattgtcctggaacctgcctccgaaaaggccgtgcgctcccgcctgggatcctgctgctcctccgccggccgccccgcacacgctccgctgcctctctgggctggctcagccgttgcatgttcctgcgtgtgcactgagacgtccaccctggcacgcttcttcccctcggcacgtggtccccacgctgtgcctgcccagctcggagcccagaggcccccgcagctccccacaacttcatggtgcagtgacctgaggcctcccctggctcagtccctttcccagggtcaggggtccatgtattgaaccaggacgggaggtgccttccccctgagctctgtccctgctgaacctggaaggcagcgcccggtggcggctcagacccccagagcctcttctgaggtccgacactcctctgctccccccagggagaccccctggcctggcccccagctctcggtgcctcggtttcctcacctggaaggtggggatgttgaaggtgcctggcctgtggctgtgcactaagctagggtgactgtgagcttccagagctcgaatgtctggaaggaagggcgcgagctgggtgcgtgtgagtgtcctgatcatggacacagagcgtggggccccttggagggctggaacccaggtgggggatgcctgggtggtgggacagagtggggctggaggagagggtctgaggaatgttccggccacagacaccccaagcccacgggaggtcaggagttggtcacaaggaaggtgaggtggggaacagagctggggcccagggtcctgatttggggtgagaggtgacgccatccccgagtcagaaagacggccaggggaggggaggaggtggggaaagcagacggacggggaggcggggggagcccagggccaggagtgtcaggggcaggcacttgagacagaggcaccctgaggtttcccagcaggcaattgataccctggcctgcagcggggaggaaccggggctgggctggaggcctggggacgcctggggctgccccaattcccagcagacacctcaccctctgggaagccccagctgccccagatccctcccacaatgctctgaccacccccaacccccaagtcctctcccttctgtccccaagcccgaggccttggagctgcccccgccctgggccatgagagctggacacagagccctccaagttccacgggcctcctgcaccgccgcctgctccgccctcctgccctccccctcggcctcccctgtgagggctgcccacctaggtgaccccggagccgcctcctcacgcctccatctgctctgcacaccgtccactagcctgacagctgcccaaagcctccagagcacagaacgggcctggtgtctgcgcctccgtctcggggtgggccacggccggttctgtgtcccgtcccctccccgctcaccagcggtggaccccagcttccctctgcagcagcactcaactcacacactttctcagagacgcgcagcccacctcgcccccgcagtttcctcttcatccctcagagccccccatggcctgggcagtccatcctgagtgtccgcaccacacgactgtagacgtttggcttctggactcaaatccttcaccagatcgtgaccaggatggcaatgaccaggcctcggcctcagccccctgcctggcctgcactggcacagcattgggtctggggagtccccgcgacaggaggcgtggggctcggggtgctcacctgcctccctctccctgctggtaatggtgggccccgggatgggggcagtgatatcctgcgggcagccgtgtcaatgcagatggctgggtgctgggtagggccccgtctcccgcctccttgggctgcctcatttccttcctgatgaccctggggtcctgcacagggcctggcggtgctggtgccgggagagcccacgctgaatggatgaaggagtgagtgctgtacttagcggggggcgctgagcgctgggtggggagcccaggacatttcctcctgctgcccgggaggtaacaccctggacccctggagtctgcattctgtgagagcgggcaggccacagagaagggagaaaagggacggagggccgaggcgggcggatacggggagcagggagcggggacagggcttactcagcaatcagagaaggcctcaaggaagaggtgacatttcagcaaagacctggcactgtctgtgccctcggtggggcagatgggctcccttcagcccccttgaggcctggcacctggggccctatgtcaggcttggggccttggtgtgggagctgaagtcggggtaggaggggcatggaggaaggggcaggaggggctgagtctcactgatgcctgtgttagtcttgtctcttgccatgcctcagtttccctcctccccagggtggggtggatgagacgactctggaggacgtatctgagagagtggggttggagccccgtaccggcaggtgtaggcgctgtgtctgctcttggaggttgggcgttcttggggagttggtgagggaacgtgctgtccctgcaccctggagcccccatgccctcctggggcccccgggagtggaggatgcaaggggcccccttcttcttccttgcaagacccacatggctctgcatgtgggggacattcctggcagggggcgctgagggccaggatgtgagtgcaccagggaaacagcagatggggctcctctcccaggctccagctgtggggtgggagtccatgctcctgcgtgtctcttgggggcttttcctccactgggtgccacctggtcccccaccctgcctcagagtattggggtctgggctcgtccaccctggatgctggccaggagtgcacctgcctctggagctcgggacgcttggccccacaggacggtgtcgcacaccacagccggcctaacttcacccctgcctgctccctctccagggccggcctgcagggctgcacactttctagttggggtgcaggtccccgggctcctgccacagattcctgtggctggccaccctgccaactctcctgcaggtgagggtgggcgcaatccccaaggtcctttccaccagatgccactgagtcccccaggggccagggctggaccctggagggggtcacctggctgaagtcaggaccaggaggggcagggggcagtcgaggggcagggggcggtcctgggccaggcgtctggcagatgggcttgctggaggtgggggttcctggtgtgcagcaggcggtgccagagggggtgactgggacctgctctgggcaagcacaggcggtgcgtgacagacctgggcttccattgactgcatcacgtccagcagcaggaaggggccacgggggcactggcgtcgtcacgtgggtcacgaggttccatgtgatgcagggagcgaggccgtcacgagggactcactggtgcctgccttggggctccgggactgtgggctgtctccatccggaggtctccctaccaccaggctctgtggggcagggaagcccagtggggtgcagggagccaggaagctggggtggggtcagggcagggtccacagggagaccgggcgaggctggcagccttcccagtccgcgcagcgtctctgcagggggagcaagagctgcccttccacccctcccaggggacgggtaggggcactctgggcttttcccaccccctcacgcagggacacaggcctggtgggtctatgactgaaattggccagaccgcattctggtggttttattcggaagggaagtttaccctgttcagcagaagctgagatgggaacaggaaacccacagggcccctttattcggcaaaaatgtcagtcagcgccccggggagcagccgagggtccctgagtgtgtgagtgaggtggggaaacacagatggactttggggggctcccccttctacaggaaacccggagtggactggaatggtgcagggggagaactcgcccctcccatcgggcgcctccttcataccggcccttcccctcggctttgcctggacagctcctgcctcccgcagggcccacctgtgtcccccagcgccgctccacccagcaggcctgagcccctctctgctgccagacaccccctgctgcccactctcctgctgctcgggttctgaggcacagcttgtcacaccgaggcggattctctttctctttctctttctcttctggcccacagccgcagcaatggcgctgagttcctctgctggagttcatcctgctagctgggttcccgagctgccggtctgagcctgaggcatggagcctcctggagactgggggcctcctccctggagatccacccccaaaaccgacgtcttgaggctggtgagcccccgagcctcctctccgtctgctcgcagatcccagttctgaccccagggcctcccacagatctcttccccatgcccctgtcctggccgttgctggctccggcgtccagcccgtcccctgctgcctggggctctcgggtcaacccagacccccagcactgggctcaccacagtggggtgagcagcagagccacagccctacccagcagacctcctcctgcgtgtgtcccccactcaccactccgtccacgggcagctggtgagcccccatttggccggatgtgggcacttctgggggctgggtgtctctgggcgtctctgggcggggccctcgagcaggtgacccaactccccggcagccctgaccttggtgacaggtgataagatcagtgtgcagcagggggctggacccaggtgggtggggtggggatactctccatgctcatgtggcactcctgcctgtccagccactatccccatcaggggcccccgactgcccatcagccagcccaggaacgaggccacggcagagccaccctccccgatgtggccctgatcagcctgtcacccactgtctggcttgtgagcctctggggcccatccctggctgcccctgctggctcttcaggggtcagcaggtccaacctaggccagcaggggggccggcaggttgtctgcccagtgggctcaatgctcccaggtgtggggtgtggggtccctggcgagggcagagttccagttcccagggctccgcgctgccaggcagcgtcatcagggctggaggaggggcggtccccaccctatcccgggctccagcggtcggcaaggttgttccatgagcctggcctggggcccgcttctgtcctctctaccaggcactgccgctcctccccattgcacagagggagattcaggctgtggggccaagcctggcagagcccacagggcagccagggcatctcccaatgcctgtcctgacccccttaggtgctgtatctcaccttcctgggagccccctgctacgccccagctctgccgtcctgcaaggaggacgagtacccagtgggctccgagtgctgccccaagtgcagtccaggtaggtgcagccctttggcgggccagctctgtgggccgagggcagacactcttgcccccttctgccccagacacccctgtgttctctgcccccacagccatgggtgtgatgaagccctggggctaggtgtgcagacagtgagggcagaacccccaggccagcagcttggactcttcaccctgggggaccctcacagtcacactgcacagggggtgggtctgagagacgtggctggcccaccgtggccagagacatgggctcgggggcacataccagagccgggccaggtgtcccaggaggccccatgtgcttccagaactttccgattttccccagagcagctctgctcatggctgatggggctgctgtgtcccgtggggctcatgggccatttgagtccccttagctggtgtctccctgcttgggctctgggcgcgggtggagtgatgggtgggctcccgaaggggcctcccgcagacttgcgaagttcccactctctgggcggcaggttatcgtgtgaaggaggcctgcggggagctgacgggcacagtgtgtgaaccctgccctccaggcacctacattgcccacctcaatggcctaagcaagtgtctgcagtgccaaatgtgtgacccaggtaagaggccagcacagccggcccagcctccgcttgggcagcctggatgcccccgcaccctgcaccctctctccatggccacagtgccccaggaaggccccggctgccccaggccaggtcccaaccccatctccatggatgcaccctgcaggggacgccttgaggtcagcctccggcccccgtccacctctgtctcacctctcactttgtcaccgccaggtgggccatcctgagcttggcgactgacccttatccctcgtccttggctcctctggtgcccggggtgggtgcccagacctctcctgtgcccacgtccctagctgcaaagtggaatgggatggtgctgggactctccggccggcactcgggcctgctgcttccccacagggcttcttgtccctttctcctccagatattggttccccctgtgacctcaggggaagaggtcacctggaggctggtgcccacctgagtccaggcagacagaaaggggaaccagacccagaggtggcctttgagtcactgagcgcagagcctgtccatgcggccaacggctctgtccccttggagcctcatgccaggctcagcatggccagtgctccctgcggccaggcaggactgcacctgcgggacagggctgacggcacacctgggggcagggcctgagcctacagggaggcacagggcaggtgggctagccatgaacagaagaggaagctggagtgctttgggggttcatgcatgtaggctgggatttggggctcacacctcaacctgcatgcccagttccatgcccctcccctcttgtgaaagcacctgtctacttgggctgaggatgtgggggcacaggtggcaggtgaggctgccctcaggaggggcccaggcccagcttgtaccccacctccaccagtacctgaagaagtggggctctcaccctacctgcctctgccattggaatggcctggtttgcacagatgggaaacccgtttgcggggtgggtgtctgggtgggcacgtggggcgaggacctgcctgcgggaccctgccctggaactgacagtgcaagctcggcgtcctgcccatctgggcagaaggctggtttctcccatcaacgaagccctcccaggaccttcctgcaagccctcgtcccacacgcagctctgccgtcccttggtgtccctcccggcctcaggtcctccatgctgggtacctctgggcacctcgtttggctgagccaggggttcagcctggcagggcgccctggcagcagtccttggcctgtggatgctgtcctggcccgtggatggtgtcccggcctccacgtacccctctcagcccctcctcttggactccagccatgggcctgcgcgcgagccggaactgctccaggacagagaacgccgtgtgtggctgcagcccaggccacttctgcatcgtccaggacggggaccactgcgccgcgtgccgcgcttacgccacctccagcccgggccagagggtgcagaagggaggtaagcggtgggtggcggacacccctcccatttccaccctggtccccagtgccccgctgtctggagccccaggtttcctcgacggcatggcctgcccaggggccctggtgagacagaaccttggccagccccaggcccacccacttcagccctgtcctggaagcagcccagtggggaacaggtgatggaggcaggggaaggggcaaggaagggccaccccaggttgctccacctcggggttctgggacttcccagtccccaggcctcgctctcgggcccctggtctggagcctgggtttatgggagtgaccatggttaatgccactgttcaagctaagtctaggaggagtaagtgtccagccctggcctgcatctggccgggcagcccccgcagcactgcaggatgtggacacagagggactcccggactcatgagatcccagctactcaaggccgggacagccagagccaccaccccaggccccacctccaagactctggacagggagcctgcccctccccgctggtcctcccatcacccgtagagcacccaggtctagaagctcacagacaagcagtccctagccgccagccccctcctggcctggtgccctcagccccctctgtccgtccctctcttctcaggcaccgagagtcaggacaccctgtgtcagaactgccccccggggaccttctctcccaatgggaccctggaggaatgtcagcaccagaccaagtaagtgaacccgggggaggcccagctctgtgccctggggagggggctccacgttgcttccctgggagatgaccgtcttctccagcagaaaggcttgaaggtcccaccctgagcggcaccctggtcacatgcctgcgtccaggagagctgcagggctgaagcctgtgtgccccagataaccccttccatgggcccagacaaagcctcatcagatctgagcttcctggaggctcaggatgggccttcccagaagcaggcccagagggaggctgcctccagatcccctgtcccctggggctgtgggtgtccctgaatgtcagggccatgggagggcccctgggcttcaggggttggggaaagtgaacactctgctctttgtccaccttcgggaggacaccttcaaatgctgaccctgggcccctaactgacctgagacttcagagcttcttgggaggagctggggtcccccagcggagcctgggatggagcagggatggctgccccagggagggggcggtggggccttccatcctgctctgccctcctcgtcctctggccccagctcagtcctgtccatctccagctctaaccatttttgtcccgacactggctctccctctaccttctgtccttgtctgccactggtctcccgtgctctggggtctctgcactgctggctgcctcccgcttctctcccctctccctctgccgtcctgtctcctttgcccagtctctccttgtttctcttctcctccttccttctctccacctccccatagccgagcttggaaaagtcagacagacctctgaggtctcatcctggagctgccaccagcccagcctccctgggacctgtcttcactgcctggggccctgggagccagggaggctccctgaggctgagtgaacactgggcgctgcacctgcctctcccacgtcctcggccccactcccgcaggtgcagctggctggtgacgaaggccggagctgggaccagcagctcccactgggtatggtggtttctctcagggagcctcgtcatcgtcattgtttgctccacagttggcctaatcatatgtgtgaaaagaagaaagccaaggggtgagcacacggcggccccatcagggctcatgtccccagccgtcacctcttggagctctgtcaccccaagcctgggaggtggccccagagcttttccaggatccgcggctcctcccagggcagccactgcaggctggggcaggtgggctttctgctgtggccagagcccaggtgtcagctggcctccctgggggaagggaaggtgggacccctgaccgtggagccctcagccacccctgcccacgcactctatgaccctgtgctcctgcctgccccctgtgggatgtggggagcaggacaggccctgctcagctgggagaagctctgggctgagggtcaacagccgccctgctggggacaaggctttgtcctcattgaggagagtaaggccattcattcattcattcattcatccacctatccgccctggtctgggcacctgtgctgtgcctggcctcctgtgcctggcctcctgggcactgaccccgctgtgtggacccggctgtggccctgggagccctgtgcacagcccccggggacgcagcttctaagcattgaggtctgaagggaaagtcagccccatcctccagccaggcggcagcaaagccacctgatcctcacccggggcctccaatgcggggaggtctcggggcctcaggctctagggtaggccgggcagcagcttagtctcacccaactgggcacctgctggtatggtgggcagggcctctccactgtgaagcgcttgttcccctcccatagatgacggttgaattagggttagttatgcacttgggggcctcagctggggaggtgggccgggcgcccccagtcctatcacccatgctgggcctcctggggacaggctgggctagcagtcccaacacagttggcctcctctgctctcagagagggtcagtcccttggggacggtctcccagggagaagcaggagttgtgcctccgccaccgctgtgagaccattgccatgagcctgtgtcccctgatcagacactgcccctccctgacctgtgtgtctgtgtattgcaggtgatgtagtcaaggtgatcgtctccgtccaggtattgatcctcctccccctctccctcccccctccaccttcccacctcccctctccccgctggggctggtgtttctggtgtacatggtgggggctcccagttctctgagggtcctgagtctttcaagtacagccacggtagctcaggaaagaacccaccccctcaaactgaaagcagtaaaatgaacccgagaacctggagtcccaggggggcctgagcaggcagggtctccacgattcgtgtgctcacagcggaaaagacaggaggcagaaggtgaggccacagtcattgaggccctgcaggcccctccggacgtcaccacggtggccgtggaggagacaataccctcattcacggggaggagcccaaaccactgacccacagactctgcaccccgacgccagagatacctggagcgacggctgctgaaagaggctgtccacctggcggaaccaccggagcccggaggcttgggggctccgccctgggctggcttccgtctcctccagtggagggagaggtggggcccctgctggggtagagctggggacgccacgtgccattcccatgggccagtgagggcctggggcctctgttctgctgtggcctgagctccccagagtcctgaggaggagcgccagttgcccctcgctcacagaccacacacccagccctcctgggccagcccagagggcccttcagaccccagctgtctgcgcgtctgactcttgtggcctcagcaggacaggccccgggcactgcctcacagccaaggctggactgggttggctgcagtgtggtgtttagtggataccacatcggaagtgattttctaaattggatttgaattcggctcctgttttctatttgtcatgaaacagtgtatttggggagatgctgtgggaggatgtaaatatcttgtttctcctcaaactgtcacctcccggtgtttcttgctgaacaaggagttccaggatggctgctgggctgttcgggggacccctgccctcctcccgtcatgcctgggggttcactccacccagagaggagccctggccgccccttcatatcccaacagctgagctctcagtgggctcttctgacctctgtggctccgtccgaggctattgctgtggattctgatgctcaaatggtgtcagatttgcccagtaaaaaccccagatctacatctgacctacacttcccagctgtgtccaccgagaaaccccagtatcagtgacgcctgctgtgcccagccctctccacctgctccgggaacccgccaggcccaggtcccgctggcaggggcttcaccaggcctctgagccacacattcatttaatggtcgggatgaggcccctttccccacatctgaagttagaagcggtgaggggaatgaccctgcagccatgccatgaggatggaggccacatagcccctccgagcatgcccgctccaccccgccctaccccctctcctttccttgtcacctgcctccagcagagcccccaggctgagccacccaccccaactcctctcctgccaccccttgtcctgtggaagctttggcttagcgtcctggggtgtggagaggcccatgcaggccaggtggagccctgggcccctagaaagcagcacttctggctgccccaccccgtgtcaccctctccccaactggaggcgtggtctccagggaccacgggcctccctgtgcatggaccggctcctgaccaccgtccagggtcattgccagggtaccttttcagaggctgaccccatagacctggctgccccccagtgctagatgggagccaagcacagcctgcccttctgcccacagtcccgggggcaggtgggagcatggggccatggagtgagcgggcaggggtggcagagggctccctggtcaggggccccaacttcccttcccccagggaggccacctgacatctgggctccaggcacagcaggaagcccacctgccccaacctgtagctcctcctcctgggaggagccatggatcctggaaaagctctggggccacctcccaggtttggggggacagagctccaagagacgacggctggggacacgagccctcatggggccgctgtgtgctcaccccttgattttcttcttttcatgcatgagattaggccaagtgtggagaaatcaatgatgttgacgatgaggctccctgagagaaatcacacccagcgggagctgctgctcccaggtctggcctcggtcaccagccacctgctgcatccgcgggagtggggccgaggacatgggagtggcaggtgcagcccccggtactcactcagccccagggagtgtccctggctcccagggctctgggaggtgagggcaggtcccgggggaggctgggttagtggcagctccgggatgagacctcagaggtctgtctgacttgtccaagcccggctatggggaggtggggggaaggaaggaagaggagagaaataaggagaggctgggcaaagaagacaggacggcagagggagaggggagagaagtgggaggcagccagcagcgcagggccctgagagtatttcagcggcaccgctgtcctgggccgcccggtgccacatctttgaaaacagttgtttaatttaagcttgtccactcagtagctgttgaatgtgggaggttatcttgttctattcaagttgctataaaaataaaaactaccatagactgggtggcttaacaagaacagaaattcggcagggcgaggtggctcacgcctgtaatccccacactttgggaggccgaagcgggcagatcatttgaagtcagaagtttgagaccagcctggccaacagggtgaaaaccggcctctactaaaaatacaaaaactaggtgggcatggtggcgggtgcctgtaatcccagctactcgggaggctgaggcaggagaatcgctagaacccaggaggcagaggttgcagtgagctgagatcccaccactgcattccagcctgggcaagtgagcgagactccatctcaaaaaataaaagaacaggaatttatttctcacatttctggaggctggaggtccaagatcaaggtgccggtagattcggggtctggtgagggtctcttcctggttcctagatggctcctcattgtgtcttgacacagtggtcggggtgagggagccttctaggtctcttttttaagggcactaacccattcctggggcttccgccttcaccaaccacctaaacacctcacctcctccgtgaggtcttctctgattgctgagtaagccctgtccccgctccctgttccctgtgtccgcccgccttgaccctccaccccttttctcccttttctgtggtctgcccgctctcctggaatgcagactccagcagtccagggtgttacctcccaggcagcaggaggaaatgtcccaggctcccgacgcagcgcctagcgcccccggctaagtacagcactcactccttcatccattcaatccattcagtgtgggctgtcccagcaccagcaccgccaggccttgtgcagcaaaccagggtcatcagggagggaatgaggcagcccaaggaggcgggagacggggccctctccagcccccagcggtccccaccgacccggttgcccacaggatatcaccgcccccatcccagggcccaccagaaccaacagggagagagaggcaggtgagcaccccccagccccgcgcctcctgtcaaggggactccccagacacaatggtccctggtggcccacggcctctcctccctacacccccatgacctgggcccagggacacagggcccctccccactcctgtcacagccagggcctgagcccagagaccccaggatcccactgggcgatgccctccccacgaactcagggccaggggccaggccgcggatttatttatttatttatttatttatttatttatttatttattttgagacggagtctcgctctgtcacccagactagagtgcagtggcaccatctcggctcactgcaacctccgcctcccgggttcaagcgattctcctgcctcagctgcctgagtagctgggattacaggcgcctataactgcgcctggctaatttttgtatttttagtatagacggggtttcaccatcttggccaggctgggttagaactcctgatctcgtgatccacccacctcagcctcccaaggtgctgggattacaggcgtgagccaccacacccggcttcaggcaggggatttagagggcattctgggcacacctccccccggggcagatggggaaactgaggctgagactggtcagtgtcacgggcacaaaacacagaccctcacccccaggctgggcctccccccatcactctgcaacagctgaggagccccaggcccccaagagtccagcaccgcatcaccccactgccctccgtgaggccctccacacagccccgacctgggtctccatggatccccacagggtcagccccacaccccaacctcccggcagggccgtctccaggggactgtccagaaacccccaaagatgcttcccttttctgttgatgggagcccctgggcacagaggatgggacagcggctgtgggtacccgagggctggagccacaccctaagggatggagggcagggtccggggcccagttaagggctccccctccactcctgcgccttcaaggtcggcctgcacctcccctgctctgtgccagtgcaggccaggcagggggctgaggccgaggcctggccattgccctcctggtcacgatctggtgaaggatttgagtccagaagccaaacgtctacagtcgtgtggtgcggacactcaggatggactgcccaggccatggggggctctgaatgaagaggaacctgcgggggcgaggtgggctgcgcgtctgcaagaaagtgcatgagttgagtgctgctgcagagggaagctggggtccaccgctggtgagcggggaggggacgggacacagaaccggccgtggcccaccccgagacggaggcgcagacaccaggcccgttctgtgctctggaggctttgggcagctgtcaggctagtggacggtgtgcagagcagatggaggcgtgaggaggcggctccggggtcacctaggtgggcagccctcacaggggaggccgagggggagggcaggagggcggagcaggcggcggtgcaggaggcccgtggaacttggagggctctgtgtnnnnnnnnnnnnnnnnnnnnnnnnnnnnnnnnnnnnnnnnnnnnnnnnnnnnnnnnnnnnnnnnnnnnnnnnnnnnnnnnnnnnnnnnnnnnnnnnnnnnnnnnnnnnnnnnnnnnnnnnnnnnnnnnnnnnnnnnnnnnnnnnnnnnnnnnnnnnnnnnnnnnnnnnnnnnnnnnnnnnnnnnnnnnnnnnnnnnnnnnnnnnnnnnnnnnnnnnnnnnnnnnnnnnnnnnnnnnnnnnnnnnnnnnnnnnnnnnnnnnnnnnnnnnnnnnnnnnnnnnnnnnnnnnnnnnnnnnnnnnnnnnnnnnnnnnnnnnnnnnnnnnnnnnnnnnnnnnnnnnnnnnnnnnnnnnnnnnnnnnnnnnnnnnnnnnnnnnnnnnnnnnnnnnnnnnnnnnnnnnnnnnnnnnnnnnnnnnnnnnnnnnnnnnnnnnnnnnnnnnnnnnnnnnnnnnnnnnnnnnnnnnnnnnnnnnnnnnnnnnnnnnnnnnnnnnnnnnnnnnnnnnnnnnnnnnnnnnnnnnnnnnnnnnnnnnnnnnnnnnnnnnnnnnnnnnnnnnnnnnnnnnnnnnnnnnnnnnnnnnnnnnnnnnnnnnnnnnnnnnnnnnnnnnnnnnnnnnnnnnnnnnnnnnnnnnnnnnnnnngggggagcagaggagtgtcggacctcagaagaggctctgggggtctgagccgccactgggcgctgccttccaggttcagcagggacagagctcagggggaaggcacctcccgtcttggttcaatacatggacccctgaccctgggaaagggactgagccaggggaggcctcaggtcactgcaccatgaagttgtggggagctgcgggggcctctgggctccgagctgggcaggcacagcgtggggaccacgtgctgaggggaagaagcgtgccagggtggatgtctcagtgcacacacaggaacgtgaaatggctgagccggcccagagaggcagcggagcgtgtgcggggtggccggcggagaagcagcaggatcccaggcgggagggcacggccttctgagaggcaggttgcaggacaatactcagtgttttgatccaggaggtcctattagggcgtttcattgataaacgcacatttgaggtggagggtggccagtgtagaatgtgcctggcagctttcacagcaaaggagaattctagaaccaaccgaagtgcccctctgaagggagctggtcccgtccgttccagccgccgtggagtaacacagccagcagtttccctcctgccacgaaagctcgagactgaaactcaggatgaactgttttcagcccgggtcaccccagccctggggtggaggcccattgaggatggccgagcaggggcgggcatccaggcaggtccagcagtcctggcgggctgaggagaaggaggtcagggctcagggaggcatccgcagagggacctggcaggcagagctccggaaaggagggaactgcacagacagaaagctccagaaggctgcctgagggtctctgaggcctccggagtcgggcgccatgcatgtggaaggtggactttcagcatgggtgggaccctagggggctgtggacccccggcccctgggactcacaggtgggagacaggagttccgaccgccagggggagagtcctggaggatcctgggctgtcggcagccacccagcagggcccgtcctgggagtggggctggactcttcctgcaggaaaggctgggctggacctgctctaagaggcttcagaaccagccacacgaagaccaaagtgaagagcaaggagctgaactccacgcagaacacagcgcagcgtcctttaaaggaaggcccaaaacaacccaacaaaaatgccaggtgatcaaagccgtcacagcacaatgtccacatccaatgagaaattgctgctacgtccagatgcagggaagagtaaccatgggaatgtgggtcagtagcaacaggcccagaagggcagccacagtggaattgtcaggcgtggaccctgaaatgacaatcacaacgtcctctaaaggaaaatgtaagcctggtgtgagaaacggaggacaaaacaaagagccaggtctgaaatgaataacgtccttgtaggcacaccagtccccctgggcggctgtcacaggacgccgcggtctagctggcttccccgacggaaatgctgtctcaggcctggaggctggaagctggcgtgagggtggcagcaggtttcgctccctgggagctcggctgtggtctgcagatggcatctttccgtgtgtcctcacgcagtcgcttctctgtgtgtgcacttccctgacgtgtctctgtccaaacttcctcgtctgaggaggactccagtcattctggatcagggcccacccatatggcctcattcagccagtcacctctttacagtccaatctcttcatcccatcccattcttagcgtgaattctggagggatcctgttcagccaataacagtaggattaggccaggtgtggtggctcacacctgtaatcccagcactttgggagactgaggcaagaggatctgcccaggagttccagaccagcctgtgcacaggcaaaacctcatctctccaaaaaagacaaaaattagccaggcctggtggcgcacacctggagtcccacttacttgggaggctgaggagggaggatcagttgagcccgtgagccccggaggtcacggctgcagagagccatgatcacaccactgcactccagcctggccgacagaggaggccctgcctcaaaacaaaaacaaaaacaggaggattaacaacagattagacagctcaaaaggaaacaccagtgaacttgaagatatactatcagaatctaccccaaatgaaaaacacacagaaaatgaataaatgaacgtattctcaaagatctcctggaaaatatcgagctgcctaacagaagtgcagttagagtctcagagaaacagaaagaggcaggaacagaaaatcatttgaagaaaaagcagtgaaagttttctaaactacaagaaaactgtgatcccacaaatgcagaaagctcaacagaccccaagaggggtaaatagagaggcatgcactgcacagcaaatcctaatcaatgcccaggaaccagggacacagaggggacctggacaccggggtcaggtgaggccacctttgggtacaaagacgcaaagataagggccgtgcggacttgtccccaggaacagttcaggtcagaaggtgagcaaaacatttttacaatgctgaaagaacatttcacctttgaactccaaacccagtgaatctgtctgtcaaaaatagaccacgctcggtggcctccgcctgtggacccagcaactcggaggccgaggcaggaggatcacttgagccccaggattcaaggccagctctggcaacagagcaagaccttgtctattaagctacaaaaataaatgaactggaggctgggcccagtctaggggactgaggcgggcggataacttgaagtcaggagtttgagatcagcctggccaacatggtgaaatcccatctcagctaaaaatacaaaaattatccaggcatggtggcacatgcctatagtcccagctactctggaggctgaggcatgagaatcgcttgaacctgggatgcaggggttgcagtgagccaagctcccaccactgcactccagcctgggtgacagagtgagaccctatctcaaatatatatatgaaagcaaatcaaagactgaggacatactgacagctgagagaatttctcagcagcagacagatttgcatgacaagaaacatccaaggactttcttcaagcacaaggaagttttttcatagggaaattgtttctttttttttttttnnnnnnnnnnnnnnnnnnnnnnnnnnnnnnnnnnnnnnnnnnnnnnnnnnnnnnnnnnnnnnatgttggccaggctggtctcgaattcctgacctcaggtgatccgcccaccttggccttccagagtgctgggattacaggcgtgagccaccttgcctggcctcatgtggaaattgaaatctgctcaaaggaattatggatgaaagaaatggcaaatgtgggaggaaatttttttctcatttttaaatatcttcaaaaataataaaatgcttaacgcaaatatgttagtgatgcattgtgacatttaaagcatatacaattaaaacctatgacagtagtataagttatgaaagggaaaggcaagtgtgtgctggtgagattcttctgcatttcccgctgcgtgggaaggtgcaggcatgtttagtggtcacacaacctgaatataggctgtgataagtgcagatggatgtcacaaacccttcaataaccactaaataaggaaaacaaagatgtatcactaagaaggcaaccatggggatgaaatgaaatactacagaaataatcaaacagaaggtaggacaacgggaaatcagaaatatgaaacagcaaataatagaaagatggtgtgcccacatccagctgtataggtaatgactttgaatataaatggcctaaatagtccaattaaatacagaaatggccatatcagatacaaaaccaacagccaactaaaggctgactacaagaaacccactttacattttaagaaatgggctggttaagccaggtgcggtggctcatgcctgtaatcccagcacttagggaggcagaggtgggaggacagcttgagcccaggagttcaagacctgcctgggcaatatagagagaccctcttctgcagaaaaaggggaaaaaaagacacacacacacaaaagagaaatgggctgggtaaaagcaaaaggattgcagctggaaattacaagacagagctgcagagaccagggagtggtgcagaagctgagcccaggagatggcatgcagagtcgccccatgcctcaagtctgcaggtgagacaggatgtgtctttctaaaggtcaggagccaggcaaggactcccatcctaccacctgcactcaacatggtactggaggtcctagccagtgcaataagacaagaaaaagaaatggaaggcatagagattggacacaaagggggaaaaagacattgcctctttgcagagaatgtgctcatgtgtataaaagtcctaagaaatcgacaaaatgcctgtgagaactagtcactttattatcaaggtcacaagatgcaaggccaatattttaaaaactaaacattggaatttgaagtataagggaaacaagaacatatttgcatcaaaaaacaggaaatgcttaggggaaatttaacaaaatacccgcaaggccagtgaaaacgttgtcgagagaagtgaaagaagttctaataactggaaaggcatggcatgtggatacatcagaagaccaagtatgaggaaaatacccattgtcccccaaatggaccaatgcaatcccagtcaacattccagcaggcttggtcgtcgaaatcgagaaactgattctaaacatgtatatgaaaacagacaggacatttaccagccgaaataatagtgaaaaggaagagcgaagttggagtattttcatttcctgacttaaagacttactgtagagcttcagccattgagagagagtggggcgggcatgaggcgtgccaataggtcaatgaaacaggagcggccagaga

SEQ ID NO: 545 - DNA, 1558 bp, Homo sapiens
ggccgtcacgagggactcactggtgcctgccttggggctccgggactgtgggctgtctccatccggagccgcagcaatggcgctgagttcctctgctggagttcatcctgctagctgggttcccgagctgccggtctgagcctgaggcatggagcctcctggagactgggggcctcctccctggagatccacccccaaaaccgacgtcttgaggctggtgctgtatctcaccttcctgggagccccctgctacgccccagctctgccgtcctgcaaggaggacgagtacccagtgggctccgagtgctgccccaagtgcagtccaggttatcgtgtgaaggaggcctgcggggagctgacgggcacagtgtgtgaaccctgccctccaggcacctacattgcccacctcaatggcctaagcaagtgtctgcagtgccaaatgtgtgacccagccatgggcctgcgcgcgagccggaactgctccaggacagagaacgccgtgtgtggctgcagcccaggccacttctgcatcgtccaggacggggaccactgcgccgcgtgccgcgcttacgccacctccagcccgggccagagggtgcagaagggaggcaccgagagtcaggacaccctgtgtcagaactgccccccggggaccttctctcccaatgggaccctggaggaatgtcagcaccagaccaagtgcagctggctggtgacgaaggccggagctgggaccagcagctcccactgggtatggtggtttctctcagggagcctcgtcatcgtcattgtttgctccacagttggcctaatcatatgtgtgaaaagaagaaagccaaggggtgatgtagtcaaggtgatcgtctccgtccagcggaaaagacaggaggcagaaggtgaggccacagtcattgaggccctgcaggcccctccggacgtcaccacggtggccgtggaggagacaataccctcattcacggggaggagcccaaaccactgacccacagactctgcaccccgacgccagagatacctggagcgacggctgctgaaagaggctgtccacctggcggaaccaccggagcccggaggcttgggggctccgccctgggctggcttccgtctcctccagtggagggagaggtggggcccctgctggggtagagctggggacgccacgtgccattcccatgggccagtgagggcctggggcctctgttctgctgtggcctgagctccccagagtcctgaggaggagcgccagttgcccctcgctcacagaccacacacccagccctcctgggccagcccagagggcccttcagaccccagctgtctgcgcgtctgactcttgtggcctcagcaggacaggccccgggcactgcctcacagccaaggctggactgggttggctgcagtgtggtgtttagtggataccacatcggaagtgattttctaaattggatttgaattcggctcctgttttctatttgtcatgaaacagtgtatttggggagatgctgtgggaggatgtaaatatcttgtttctcctcaaact

SEQ ID NO: 546 - protein, 283 aa, Homo sapiens
MEPPGDWGPPPWRSTPKTDVLRLVLYLTFLGAPCYAPALPSCKEDEYPVGSECCPKCSPGYRVKEACGELTGTVCEPCPPGTYIAHLNGLSKCLQCQMCDPAMGLRASRNCSRTENAVCGCSPGHFCIVQDGDHCAACRAYATSSPGQRVQKGGTESQDTLCQNCPPGTFSPNGTLEECQHQTKCSWLVTKAGAGTSSSHWVWWFLSGSLVIVIVCSTVGLIICVKRRKPRGDVVKVIVSVQRKRQEAEGEATVIEALQAPPDVTTVAVEETIPSFTGRSPNH

SEQ ID NO: 547 - DNA, 1930 bp, Homo sapiens
cttggggctccgggactgtgggctgtctccatccggaggtctccctaccaccaggctctgtggggcagggaagcccagtggggtgcagggagccaggaagctggggtggggtcagggcagggtccacagggagaccgggcgaggctggcagccttcccagtccgcgcagcgtctctgcagggggagcaagagctgcccttccacccctcccaggggacgggtaggggcactctgggcttttcccaccccctcacgcagggacacaggcctggtgggtctatgactgaaattggccagaccgcattctggtggttttattcggaagggaagtttaccctgttcagcagaagctgagatgggaacaggaaacccacagggcccctttattcggcaaaaatgtcagtcagcgccccggggagcagccgagggtccctgagtgtccgcagcaatggcgctgagttcctctgctggagttcatcctgctagctgggttcccgagctgccggtctgagcctgaggcatggagcctcctggagactgggggcctcctccctggagatccacccccaaaaccgacgtcttgaggctggtgctgtatctcaccttcctgggagccccctgctacgccccagctctgccgtcctgcaaggaggacgagtacccagtgggctccgagtgctgccccaagtgcagtccaggttatcgtgtgaaggaggcctgcggggagctgacgggcacagtgtgtgaaccctgccctccaggcacctacattgcccacctcaatggcctaagcaagtgtctgcagtgccaaatgtgtgacccagccatgggcctgcgcgcgagccggaactgctccaggacagagaacgccgtgtgtggctgcagcccaggccacttctgcatcgtccaggacggggaccactgcgccgcgtgccgcgcttacgccacctccagcccgggccagagggtgcagaagggaggcaccgagagtcaggacaccctgtgtcagaactgccccccggggaccttctctcccaatgggaccctggaggaatgtcagcaccagaccaagtgcagctggctggtgacgaaggccggagctgggaccagcagctcccactgggtatggtggtttctctcagggagcctcgtcatcgtcattgtttgctccacagttggcctaatcatatgtgtgaaaagaagaaagccaaggggtgatgtagtcaaggtgatcgtctccgtccagcggaaaagacaggaggcagaaggtgaggccacagtcattgaggccctgcaggcccctccggacgtcaccacggtggccgtggaggagacaataccctcattcacggggaggagcccaaaccactgacccacagactctgcaccccgacgccagagatacctggagcgacggctgctgaaagaggctgtccacctggcggaaccaccggagcccggaggcttgggggctccgccctgggctggcttccgtctcctccagtggagggagaggtggggcccctgctggggtagagctggggacgccacgtgccattcccatgggccagtgagggcctggggcctctgttctgctgtggcctgagctccccagagtcctgaggaggagcgccagttgcccctcgctcacagaccacacacccagccctcctgggccagcccagagggcccttcagaccccagctgtctgcgcgtctgactcttgtggcctcagcaggacaggccccgggcactgcctcacagccaaggctggactgggttggctgcagtgtggtgtttagtggataccacatcggaagtgattttctaaattggatttgaattcggctcctgttttctatttgtcatgaaacagtgtatttggggagatgctgtgggaggatgtaaatatcttgtttctcctcaaact

SEQ ID NO: 548 - protein, 283 aa, Homo sapiens; identical to SEQ ID NO: 546

SEQ ID NO: 549 - DNA, 2260 bp, Homo sapiens
cttggggctccgggactgtgggctgtctccatccggaggtctccctaccaccaggctctgtggggcagggaagcccagtggggtgcagggagccaggaagctggggtggggtcagggcagggtccacagggagaccgggcgaggctggcagccttcccagtccgcgcagcgtctctgcagggggagcaagagctgcccttccacccctcccaggggacgggtaggggcactctgggcttttcccaccccctcacgcagggacacaggcctggtgggtctatgactgaaattggccagaccgcattctggtggttttattcggaagggaagtttaccctgttcagcagaagctgagatgggaacaggaaacccacagggcccctttattcggcaaaaatgtcagtcagcgccccggggagcagccgagggtccctgagtgtgtgagtgaggtggggaaacacagatggactttggggggctcccccttctacaggaaacccggagtggactggaatggtgcagggggagaactcgcccctcccatcgggcgcctccttcataccggcccttcccctcggctttgcctggacagctcctgcctcccgcagggcccacctgtgtcccccagcgccgctccacccagcaggcctgagcccctctctgctgccagacaccccctgctgcccactctcctgctgctcgggttctgaggcacagcttgtcacaccgaggcggattctctttctctttctctttctcttctggcccacagccgcagcaatggcgctgagttcctctgctggagttcatcctgctagctgggttcccgagctgccggtctgagcctgaggcatggagcctcctggagactgggggcctcctccctggagatccacccccaaaaccgacgtcttgaggctggtgctgtatctcaccttcctgggagccccctgctacgccccagctctgccgtcctgcaaggaggacgagtacccagtgggctccgagtgctgccccaagtgcagtccaggttatcgtgtgaaggaggcctgcggggagctgacgggcacagtgtgtgaaccctgccctccaggcacctacattgcccacctcaatggcctaagcaagtgtctgcagtgccaaatgtgtgacccagccatgggcctgcgcgcgagccggaactgctccaggacagagaacgccgtgtgtggctgcagcccaggccacttctgcatcgtccaggacggggaccactgcgccgcgtgccgcgcttacgccacctccagcccgggccagagggtgcagaagggaggcaccgagagtcaggacaccctgtgtcagaactgccccccggggaccttctctcccaatgggaccctggaggaatgtcagcaccagaccaagtgcagctggctggtgacgaaggccggagctgggaccagcagctcccactgggtatggtggtttctctcagggagcctcgtcatcgtcattgtttgctccacagttggcctaatcatatgtgtgaaaagaagaaagccaaggggtgatgtagtcaaggtgatcgtctccgtccagcggaaaagacaggaggcagaaggtgaggccacagtcattgaggccctgcaggcccctccggacgtcaccacggtggccgtggaggagacaataccctcattcacggggaggagcccaaaccactgacccacagactctgcaccccgacgccagagatacctggagcgacggctgctgaaagaggctgtccacctggcggaaccaccggagcccggaggcttgggggctccgccctgggctggcttccgtctcctccagtggagggagaggtggggcccctgctggggtagagctggggacgccacgtgccattcccatgggccagtgagggcctggggcctctgttctgctgtggcctgagctccccagagtcctgaggaggagcgccagttgcccctcgctcacagaccacacacccagccctcctgggccagcccagagggcccttcagaccccagctgtctgcgcgtctgactcttgtggcctcagcaggacaggccccgggcactgcctcacagccaaggctggactgggttggctgcagtgtggtgtttagtggataccacatcggaagtgattttctaaattggatttgaattcggctcctgttttctatttgtcatgaaacagtgtatttggggagatgctgtgggaggatgtaaatatcttgtttctcctcaaa

SEQ ID NO: 550 - protein, 283 aa, Homo sapiens; identical to SEQ ID NO: 546

SEQ ID NO: 551 - DNA, 39095 bp, Mus musculus
  misc_feature (1)...(39095): n = A,T,C or G
cattgtgacacttaaaagctgtcaacattattatttatctgcatattcattcaaagagaatatttcattataatggatataagtatgccaggatcacgtaagccaagaataatagactttttcaagtaatccattaccttcccacgccctgccaggttacagagtcttaaaactttgcaatgttgctttttttttttaatttgtgtgtgtgcacatgcacacataaatttatatatttacatgcaatggaatttaattcagccctttagtgcagaaattctgcagtaagcaacaactataatgaacctagacaatataaccctatgtaaaacaaaaatcccttgtaactttaggtttctgaaggatcaagttctcttgctgaccccaacatcagaaataagaaaaatctgtcaaataaaaagaaagaaaccttatacaactagacagaaaactttttacttatcgatatgttagaaagcttatgatacattttgaagataataagttgtctttaataagtgtcatttaagctgaccttgcctctttgtaaggcaaagcaaagctaggtttctgtttagaaaagacagagccacaacttgctgtgactgtacgctgcgactggaaaagcgagttcctaccattttaggcaaagaagcacttaactaaagacaaacaaaaatgttgaatttcagcacaatcaagtctgaaagcactgatgtttcttaagggcatatcttttctctcgctagcccatcctggctttctcgcagttttaacacacgcagatgaacataccctgaacccgagagtgtgtgctgaacagaagcagcagcaagctagtctgggactggctgttggaaggagagggagccctgtcaagggagctccagagtgctctcttttctcctagaaaaagaagaaggagaaagaaggcaacattcaagccttggcaaggaggaagtgaggaagaaccatgagactcaacggcgggcgttgaactgctgttgaaatagcttcctcagacgcatccaaggaagctttaactctgcaactcaatgaaatggacagagaaataaacaaaagcaagtcatgtgtaggcaacaggatttacagagtcacagagcagtcatgatgttcgtgggaaatgaagagaaccagaaatcggtacatgaagcaaaatatgccaaactcagaaaaacaaatgacacattttctctcgtctgtagaaacacacacacacacacggtctctctcacatactttctctctcacacacatatacatagacactcatacacacacacacactcaaacatactctgacacatactcatactatatttgtgttaagtacatgaaactagaaagaggtcatgagcaaagaagatgtactaatagagaggaggaaggaaaaaggaagtggaatacatgagtcatgagaatagagtgggggctgtctagaagaaggaaggggtccaccatagggaagcaggggctgggggagggcaatgggggactggatgaactatgacaaagtccaatgacacattgtatgaaaatgctataatgaaagctgatacttcgtacgacactttaagaaaagacattaatttttaaaataaattctagctagagggatggctcgctgattaagagcactgactgctcttgcagaggatccaagtttgggtctcagcacctaatggtggtttatgattgcctgtaactccagtatagaggatctgatgccctcttctgacccctgagaagatctatctacagatacattgtgtacttgtaggtacaaacacacatatacattaataaactaaataaaataataagtagaaaagaatttcagtatgccatcctgactagatgtcaaagcaggagatactttgaatataaaatggaccaaaagcaacatcaactgtaaccttgagatgttcaaccattttagctgtgagaacagattctgctgacataaaagtatggagggcaatttcattggaacttccttagggcataacaatacattagagcaaagggaaagttcaaaaataaaatctcttaactcatttgttaagcacaaaacaaaatctacaaagaaaaggaatgggaagccaatgttgcaaacagcaagaaaaagaaacattgagattcaagactcggatgtcttgtttcaaaacagtggcagcagactggctgtcttggctgacactgtctggaaaccctccaaaagcaatgagggaagagaaaggaacgcaataaatctattttgggtgaacatagaagacggtttatcttatccaatttatccaaacaacagagcaggtgaaagggcctttgattgcagtgagaatcaggcaggcagatgatcccaaaaaagtggggaggaaaatattgaaactggctatctcagaaagagtcagaacaaaagtacatgaagcacagaggtgcggggtgggggtgggggtgggggtgagtcacagccacttgtgtccctgggaagtgtgaaccaactgtaagagtcagcttatctctaacacaccggggcccgaggaacagaaaaggaatgttggtttggttttgtaaacaaggtctcacataagcaaggatggcttcaaatgtcctatgttgcaaaggatggccttgaacttctcatctacatccctagcgccaggatcatatataggcgccatgcctggtttcatgcagtgctaggaattgaacccagagcctcagacatgctcggtgagcactctacgacccgaaccacaacctttgcttcctggcagtggaagagaagctttgcctcccttcaagaaccaaacagaccagctcgagagatggttcggcggttaaaaactcttattgctcttccagaagacctgagtttggtccccagcatccacgtctagtggctcacaactacctggagctccttcttgttgagccatgacacccagttctgttctggactctgaggacacctctacacatatggtattaactccctccctctttcctactgtcctacgaactcccttggatggagttgtttcatgagagacaagaacatgcagcagggatacggatgagcaaaggcatgctgaggaactggcttgacaggcaagagcagggtaagcatgggaacctgaatgtgatgcccatcccacgccctgcccccatccttcagccctgctcctgccccctcccctgccctttgccctgttctacccagtgcacctacaaaaaaaaaaaacagtgagggtttataatcttaacacttgaggtcagagacacgcagatcctgggagctcactggtcagtatgtctcttataatagtataaaggtaagttttgggttcagtgggggagcttggctcaaggcagtaaagaggaaagcaatagaaaatgacaccaaccatcttgtggtggcctctgcatatgccagccccagtgcacatacctgcacactcacacacataaatacatacatatgtgcatgcttgcatacatatatacatacatacatacatacatacatacataaatacatacatacatacattttaaaggaaatacagagaaataacagtgttagaaatcagaaaagagggggaagttgaagaccaagtacaagatggcaccagaagaagcagaatgggattaggtactgctgaaaatacgataaacggcatgaaagataaatgtgaagtgaagtcaccaaggtcaagagaaaagatattaaaagtcgggctggaggtgtgtcttcacagccagagtgctgatgcagcacccaagtttgacagtccagtcgagccaagagaaagaggaatccatgaaaggaattcccaattctcaccttaaataaaagttcagcatcaggtatatcttccgaggaaagaagccaacactatgaaatcagcaagaagccaattctgtggatgtcatataactttaggaatacaggtgtgcacatggggaacctatgggcgtttattgaaatactgcttgttattagcattttgtggcaagttctcatgtatcccccagatagactcaaactcactttgttgctgagacttgccttgagctcctgaccctactgcctcagtctcccaagtgctagaattatggacaaatggctgctggaatttgagcaaaagttagtactgataaagatggatatagtcatgctttaaatagattagacaacttaggtaaaacaagttcattcaaaaaactcacaaactgctgaactgactcaaaaagaaatagaaactctgggaaaatccctttttagaaaacaatcctagaagttgaatttacaacaaaatatttgcacagagtccaggcacaggtaaattccctaagcatgtgcacatatgcacagcacacacacatgtgcacatatgcacagcacacacacatgtgcacatgtgcacagcacacacatgtgcacatatgcacagcacacacatgtgcacatatgcacagcacacacatgtgcacatatgcacagcacacacatgtgcacatatgcacagcacacacacatgtgcacatatgcacagcacacacacatgtgcacatatgcacagcacacacacatgcttaaggaagtagaccagagaattcttcctcatccaagccaggcaaatatcacaagaaactagagatgcaagatgtcagttcgggaactttagaaaattccactggaattttctcccctcctggaagcgaaaggtcataaagaccataggcacctctcctgtccggaagggaggggctagttacagtcctcagaccacgaggaggaggggccaaccaccagagctcatagactcattcggataccattggccacccacctctttccctataggccaatcagtttaaacgtcacactgctctgccaatcacattgtgcctaatgggtgctgcctggagaactgtataatggctcaacggacaggctgtgcgtgctcattctctctctccatgtgcagggcgactccaacatgttggaacaataaattcctcttgctttttgcatcagttcccagctctcactcagggagtccccagtaagctaaagctctccagcgtcttacaagaccactagaccccatggcagtgattctcaaccatcctaaggctgaggctttaatacagttcttcatgttgttgtgacccccaaccataaaattggctttattgctacttcataactgtaatgctgctgctgttatgaatcacaatggtaacgtgtgtgttttctgttgttcttagacgacccctgtgaaaggatcattaaacctccacagggatcggcacccacagattgcaaaccattgccttctgtccttctctgtccccttgctttctctgcctcttctcccttcgccagacctccttcccatgtcccagataagcttccttttatactggacccatcattgggctaagatgggggggggggcggcactaagacaccccttcccacggcgtcgtacctcgtgttacaaagcatcagtgtgtgtgttcatatgtgcatttggaggtcagaggtcaatatcaagtgtcttcctcacttcctcttcatcttatttttcgagacactgtttctttcttgaacctggagcacaggactggctgaccagcaaaccgttgcatcttctgtctctactttcccagcgtacaggcttgcccggcatttactgggctggttgttgttgttgttgttgttgttgttttaaagggtgctggggatcaaactctggtcatcatgcttacgggcaagcattttacctactgaactattcgcccagcctttgaaactgtttgccatcgacctgaaaagtcacagacctctgtacccaaaactggtttcataatggcactaaaaacaaagttggcagtgacttccagtctagagatgaagggcaaaacactttccttttccttttcagcttcggaggcatctggcaacgtcttagcctgaatgtaacaggaggggagccccacccagaccgcagataccagaatgtaacaaaaaccggaatctgcaaatagcacatgcccttagaaaacagaacctgctgccccgtgtgaaggacaacccgggcctgagtagcttctaattacgacctgcattttcaacatgggatcctgctacaatctatttattaaatatattttattttcatggggcattaacagggctgagtaaaattctccagtttccttattttctaggcttcctaatatgcttcagacccattttattatgtctcaaactcaggacaaaaggctagctggggtgcctttttaacatatcaaagaggacctggccaccaggttctcccagacgctttcagtacttgttaggactcctcctgactggcatactccaccccctaccctaaactctccagcccaggggctgagcttaccttcccccacctcccaccttctcaccccccagcttctcgaattcctatataaattcagcaattttggctactggtccttttttaacctcttggactcttggtctctgggttcccaggcagtctctctgctcctctctcctctcacctcaccctcctgggtcagtctggacccttccagatgcctctggctatgctctgcatcatttctacagtaaaagctctcctctaccatacctaggagagtcctgtggtcattactgtttttaataaatgcttgtcctttaccaatgagtgaggatacaggtgcaacaaaagggttgtgttccaagatttctgtcagtcattgggaacacagatgtccttctagcattagcaaatgtaattaagaagaaatatcagtgtatggagggtgagaataaagatgatattgttggcatttcatctaggctccgccccacagttacctggcaacagctaggtgtgcctgactcactataaaaggggctatttgcccactcctctctctcttgccctctcgctgctctctcctctttttctgctcctcctctttctccattcctcctccccctccacatgctcatagtcagcctcttctcctcctccttctcctcctcccctcctcttcttcttcctcctcctcctcctggtgaaagtgtccagtactgtcaacattagctccctcttttgctaacccacagttattttaaagctctcctccccgtccttcttcctccgctctccgcctctgtctccggctccgtctccatctccccacccctcccctgaataaattctattctatactgtactggcctgtggctggtccctcagagggagaagggatgcctccgcctgggccccacagaggcaccccgtgcctccacaccttactacactctaccactctaccaaacaattccttctctcttatctttttataaaacacaacagatatgatggttggataaatggagacccaaggtggtttataatttacttccagatatgaaaccttacagtacaggttacacaacaaatatcctaaaatgttttggcacagcttgcttgacccatacactttatctttactggagagcctctcgaagtattatgctgtcaaaaaatatgttaccttgtgtaaaatactaccttttgtgcctgcttgtaatctagccctcttttgctaacccacagttattttaaagctctcctttggagctatgactatattcaattagctatactgaacattttttatattctatgcactgtactgagcatgtttatgtattgccacagtcctcagaacaacctttgtaagtgatcatcattattaccatagaatttaggttccaagaggaaaagtaattttcccaaggtcacttaaaaaccatagatcactgagacactctgttccactcgcaggatctttctgtcccatgcaatgatctctgtgctctgcccacacaataagattgtggcagttcgagaaatggacagagtgctatctggggcattctgttatttctggcttcctcctagatcacagactcctacacacttaaaaagaacagtagcgcccagctctgtggctaggatcagccagagcccagctagtgagcatggacacaaacaacagtgtgatcttcttgtaaatagcgcatctctcttcccagcctcccgtccctgacatggggacaaaggaacaagggtagctcctgctgacttggcactgtgggaaatgggaccagcagctgtcttcagctcaaggctaaatcaacaaagagcctccttctccttcaggctttgagtttgaattagctccgtatgacaacaatgtttccacccagtgctgttccagactttgtgtctctaaggctgataggcaaagaacagtagaatccaacttggatccactttagaaaggacttggtgaaagtgtccagtactgtcaatattagctcccttcttggttgaaaggggacagtgtctctcctctctgtatatcttgggttggctttcttcagagtgagtgtagaccccctggctcttccagaataccaaatctctccacccctttactcccaggcttcagacttacacagtcttttaacatccaaaaactcaacaagagaaggatcttttgttctcacaggagtctggaaagacttgtagctgtgttcaggaagataggacatttcaagggccaagattgtcacacactgttactatgaaaagaatgtgtgtttacaccccacccgcacctggggagaggcagtgggttctcaaaggaatatattttatcagacaactttttaaaagtttttttttttttttagaagggaacaggtgtgcactacactggaagggattaataaagctgacacaccagcagaaggtaacactgttggctgaattagcagggaatgccaagcccatgggagggggacgatggcttaaaatgttgagttcgaggcacctgtaggacattaaaatggggcaatttcttggagagggagatgaatcaggagcataggaagattgatgtttaatataaaagcattaaatcataaaatagatccatgctatagtatggactaagaagtttccaagtggggagggtcttcagttcattcattcattcattccttgggagtggcagctcagccagattgcctcaagttccaggccaccctgagctatgtcatgagttcctggctaatctgaactatatagtgagttcaaggctagctccagtcagagagcaaagcagaggatgatgataactgtaagaaaagaggatgatgataactgtaagaaaagtgaggtagagaagatagaccttgatccccacaggttgagactgatttattgcaacagcgaggggccccaagctttctgctgttgcaggttgagcccatttacagacattctctctctctctctctctctctctctctctctctctctctctctctctctgtgtgtgtctctctctgtctctctctctctctgtctctctctctctctctgtctctctctctgtctctgtctctctttctgtctgcctctctctgcctctctctctgtctgcctctctctctctctctccctctctctctctctctctctcatactgtttgagagcccaaaatattgtttgtgaaacaattaggctgggactaagcaattctttatggctaggggctgttgcccagtaaacccgactcagcttctcatgacctgaagttacctagtatgttgatggggagtggttggagagggaaaaaaaagggaagaaggaagaaatggaggaaggtgtaaggggaggaagaaatgggaaaacggaaagaggctggagaggaggagatgagtggaggaggactaattctcatttatttagaatctccagacattattgaacactgcannnnnnnnnnnnnnnnnnnnttgaacactgcacaaagcgccattcaactagaggctcctctgatctcacctggccggccccactgcagggtgacggcgcggggaactacaactcccagcgtgccccggggctggcggagccgtgggcgtggcctacagctgccacagcaggcgggcggtaccgagtggagtcggcggggccgagctcccggatgtggagacgttggagcggcggcgtgggaggaagatggacgcgctggagaagggggccgccacgtcggggcccgccccgcgtggacggccgtcccggggccggcccccgaagctgcagcgcagccggggcgcggggcgcggcctagagaagccgccgcacctggcagcgctggtgctggcccgcggcggcagcaaaggcatcccactgaagaacatcaagcgcctggcgggggttccgctcattggctgggtcctgcgcgccgccctggatgcgggggtcttccagaggtgcgcatgtgcgggagccgggcccgggtcgggggtcgggggtcggggtccccaggcctgaccctgggtcgcccctgcttgatgggcgcctgtcacctctgggctgcgcagactgccgggtgctgcaaggcccgggaggcagcaggtgcatgaatggagtcgagttggggctccccagcttagagagtcttccctcacctttgagaaaaaaatattctctggctgtgaggctgtgagtcagcacaaagaggaaatggtccctacgtgtgtacgaggtatgactgttttatgggtgtgaatgggtttagcctacctcttgaactttggcctcactaaaggcagtttttatctctgcatcctctcggcctccaccggattgatcaggagttacaagttgatgccattcatcaaaggagggagataaaaatcctttgccaacaaggaatttaaatgcccgtgctagctgcatccaaattctgcttgaatttattgctaccttttgatgatttggcttttaagatgattgattcagaaggctattgatttccccatattatgaaggcagattttttttttcacccaactgacattgtttaaagatgggatagcaaaagatataaatgtatgagttttctttgtgttttgactcaaaggaagctctgggtggagctaaagaaacagctggcttctgaaaataacacgtaataggaagtgtgctgaggagagataggggagtatcgtgaatttggttcagctcagtaaacatttcttgagccccacttttttccatacacacgcaaggagatagcaagacggtccgtgcacagttctatcccttacggagctctcgattggtttttgtttggttttgtgtttttaaacctctcagaatgcagactgcaaaggagtgagaagttaattatgtataggccacagggacaaagtaacatctatgaagggaaaagagtttgaagtcatactgaccatagattgagaacaaaattattgttcatgactctcaggtcccatgtcaggaaatgactttcagagtggattcagaaagggtactggtagaactggagaaatggcccggcgcttgagagcacgtactggttttccaaaggacccaagttcagctctcagcaccattgttggatagctcacaactgcctgaaactccgcaccaggagattggatatccttttctggtctccacaggcccttggtctcacgtggacatattcacactatacaatcttttaaggggagtgggagggtaattgatagaggcgatggctctggacagaatgcttgccatgtaagtctgaggaactaagatctcattccctgagcccacataaaatccaagtgagagtctagtgcatctgcaattacagcaggacaggagaatctggaaactcaggggacagtcagcttggtgtacccagtgaacaacgaaagagagaccctgtcacaaacaaggtgacatgtgaggaccagtgcctgaggttgctctctgacctccacacatgtaccaaggcactcatgcatgtagtcacacaaacgcccaccacatatgcacaggtaagtctttatgtcccgtaattaggcttaagaacaaaagatgaatcttttattcagcacgtgctgtctattactatgggactgggtattgctgtcttgagccaagggttagagcagcagcaggagccagctatgtagaaccattgacaggcgcagccccatgccccctctggagccatggacactgataggaagagtaaggcttgttgggcacaagcctcgaatcaaaggtgacacccctgttccatctcttcagaggtgatgctgtgcagaacatgcgggatttctgaggagtcaacttttagccctagtcacatggacacaagatggtcatctgttttcttggttgtctactctcttgatggtgtgacatccaggtgtcagcaggcattcctgacccttgtaaacctgaagaaaagtgactgattggaggtgatgtgacagatagctgtcttcctgacagttccccttacccgtcacagacaaggctgccctactggttagttctttggggagtgtggttaaacagtgaaaaacacacttgttagtccatgccacatgctgtgatgtccaagctcatctctgcacttcctggctgccatgaggtagacatctctgctgcactgtgttccctccaccatgatactctgccccatcacaggccacaatgttcacgctaagcaagtaatagaaagatgtcagaaagtgactcaaaagaagtctttccttaggttgtttgatgcactatcaccacaactaccacagctgagcaacatgtagaacacgtgtgtggtatcagatgagatttgttactataagtacacaagatggtgtgctctgtcaggagaatctgcagtttcttgtctcaggatgggttgtccctttctgatgtcaagcagagtgttaggagatccatctgcctctgcatatgtgaccatagtctttgtccacttaagaccatattgttgattcggtctcgctctcatggcattcccacctgagaagttgcagtgcctccggttgaacagactgttcctgggaaatcatgatgggctcagagacccctaagccctctcttacagagtgaacttaggaagtttcagtcataaaaactctctcctccatgataggactgttcagacatgtaccttccctgttcatgtgaactgcggaccttctgcagtgtagcttgtcatgaggataggcacttgtctctcttcctgtctataaactgttcataaatacagaaggttctttgtgtggactgactgtttgaatacctcttgatgcctctcccttgcctctcctgtctttaaaaatgtttccggtttctgatttcaggatactggagtctagtttcttccttattgcagtggctgtggaggacagcatgccctttgtagttgttagtgtctgggtttcgttagttgcagcacctgtgcctttccaggagcagtcaggtctgctcgcctttacgtttgaaaatccttacctcatcagaccccactgtatccctgactcatcctcaagccagtcactgttaagtagaaaacaatgcctgcattccttcagtcagcccacctcataagtccacagacagccctcacggaagcatcatgaggaaggctagagaagtcaccgagtgaggagagctcctgcttcatttattggaacgtatctgtgtggggtccactggtgaactagctcagcagataactacactgactaccaagcccaagagtctgaatttggtccctggcatccacatagtggaaggacagaacagacttctccacacaggcaattgtgtgtccctcttcctgcacaccacaaacataaagtgaaaaaaaaaatgtagattcatctacacaaaatcccactaagaataatgcgagcatcagcttctctgtagcagtcctccatctgtggaggacgtgagcccttgctgctctctggttctttgagctgcgtatagtacctgaagtgataacaacgactaggaggaataaatcccttccatgggccagcagcttgagctggccagctctaccctctaactggtctgacagacctcactctgtttctagtggtgcctgctatgagcactaaccctctgtgaggacctgtcaggattaactgggtaagagaaggggccagcagtgcttccctgagtctctgctgacccactctgaaagtagcccaatactgctgcttggtgcctcagtttttaggatggtgagggtgttgaccacagcttctctgtagtagtcaccacacccaccattgcccctttgtaccccaacatctccatgtacagggtggatttgagcatacacctcagaggagaggctcattggggattcagggagataatgtgccctcagccctgatgttaactggcagtgcttctttgtatcgaatgctctgagaataatctgtctcttcccatgggccatggttcccttgcttgtaaatgaagaactagtaatcctgaaaatgccttttctttgactttggacggttaatggaaatgtgtctttattctgtcttgcagattccagcagactttttctagacaggaccacacaatatatattgccagttttgcaggccagatggtctctgttgtaatttctcagttctgagcctgtatgttaaaaaagtgggcatgaatgaaggaatgtggccgtacaccagtagaccattacacagtctgagagaaccctgtcctcctcattctggttagcagcgaatcttagatcctccattaagtgtatgcattgagattgaactggctttgtaggaccccccggaggactttgcagcatcctccctgcctgcagcgcttgcttctttcttcagcaaacacttaggttaggaggagatggaagaagtatgtggtggcctgtttcagtgtgtttttcaggaccagagattcttttgttcagagccatgctttgactggggattaggggcagagttttcagcctgcacatggtagaagttaacagaacttttccaggttactaactctcctgagacggtcagcagtccagaaactagctggtgagcatattcgctagaagactgttcctcgagcctggaagacccgtgattttcaaccatgcgttagcatggtgtgagcaaatcagagaacaagttgatcttttgactcttgtataacatagtggtgaaaattggcatacattttagtttcatttttaagccttcatgtttatgatttgtgaggggcctgtgctctattatcatccttgaaatgacactttgtggtttaaagtcattgtcacaggcaccatagttggtactgtgtgtattgagttaggtggagcatcagttcattccagattaaagccactgacacttacttcctggagtactttctaggtctgctcattctcagacattctttcacttacccattccatctgatggccctcaaccaaagaaaggtgtgtccactggtcccttgtgttaagtacgttgtcacatgtcatataagcaaagctttttagttttcttccagattaaattagccagtgcacagtttgttacgtctcctgtttcagtgcctcttccttctgtggcaggcagcttatatttaatgcccatcgctgtatgcacatctatagttagcagcacctgtgctgtgctgtgctgagctgagacattgctgctcgtaagcattctccagcccatccattcatcaaacacaagccaagtatgtagtagacagcaagaactgtaaagcatgtgtgggaaagttaaggcattagaaggagtgtgggtaccgaattgattctcgagtctctccctgactgcttagcaggaattaccacattgtatgggcctgtctctactgaaaggccaagaggaagcattgtcctgaaatagctgtcaaaccccagtccagacagaccccagcaagcatttctgagatgaggaataagagaaggaaggaagggggacaaactgataaactttttaatttatcttgcaaacatttaaagctgatccctggacctccactgtaatcatcacacagttcttgggctgtaaagtaattgccagagacacgtgcctgcatgctccttcatttttctgtgctttccttatccttcccttcacctgcaggttcaaagcccagctcagttgtttcattagcatcagtgttccactgcgggcaggggtagggagtctgtcaccaaaccatctacagcacaaaagaaatcataaggagatgggggcttagtgactttatcctcaatttaaatcctcaattatgtatccttaaatagatagtggtgggccgtgtgtgtgtgtgtgtgtgtgtgtgtgtgtgtgtgtgtgtgtgtgtgagagagagagagagagagagagagagagaatgagtgatcactctccacctgattccataaggcagggtctctcactgaggttggagctaggctggcagacagcagtcatcagcaatcctgtttctgtctatcagaattctcggttacaggtacacctggcagccatgtctggctttttcagtagggactagaggtttgaactcagatcacctagtaaatatactcaccacagaatcatcttttttccagcccgtaaatcctctttctacaagtgcggaagggaatatatgaacttaataaatgaaatctagagggtagaaaatttccttttcttaagtgatcttggaaataaggtgtgtatattctttctctctccgtaaatgctgaatgaattggacagaaagaaaagagtacacgtgtatgacagagtccaaatcttgaactatctgcatcctaccattattaaagcattgtggtccaagtaacatttatgtcctctatatttagaaatgggagtttgtgaaggttcagaaaagagagcctcagtagagactagcttgtctgcacagagaagcacttggctctctgtctcgggcatacagaatgcagtaggcagctgagctgcggtgcttagagctaggccttccccagcctgtgcagccatggtctctgccacagtggtgagtgctcagatgtccacatgctcactgctttaagcataaagttggatttttctgggcacgggaacccaagtctggacattgactctcttctgatcatcagttcagctaagtccagtgtactttacatacatattcctgtcctgtgaatgatactttgggtttaaattggcaaatcaccttcagctcgctttagatttgacttctagtgatatcttaacgtagtctatgactatctcaaaaatactgagtgggttcatttttcctagtttgtagaaatagaattttgaacctaaataacattctctgtgtgtgttgctcttttgtttttgtgcattgtttttggatctctgttttttttttattttggttttggggggcgttgaatcaaggtctccctatgtggcactagttggcctgggattcaggaacatcaccccaacctgcttcctgagccttgagggttcaggcacataccacgatgcctagattaatgttgctgtacttgtgcaaaaactttttcaacgccaagttgtgtgcattggtgcggagctctgccttacgttggcagtcccttctggtgactctgttatttaactctctttttactgtccaaacagtgtgtgggtttcaacagaccatgatgaaattgagaatgtggccaaacagtttggtgcacaggtccatcgaagaagttctgaaacgtccaaagacagctctacctcactagacgccattgtagaattcctgaattatcacaatggtatgagtttgactactcaattcagatcgtaccaacacaagccttgtgtgaacatttcataagacgtcagtattgtgtgatcaccagggtggtgcttgatgccttccttttgtgttgtcctcagaggttgacattgtggggaatatccaagccacatctccatgtttacatcccactgacctccagaaagttgcagaaatgatccgagaagaaggatatgactctgtcttctccgttgtgaggcgccatcagtttcgatggagtgaaattcagaaaggaggtaaccaactcattgtactaaaagccaagctttgttttgttttgttagtataaacattgtcagcagaaagagagctagggaacactgacagtgcttggggtacagctgcagtaggcagtgacaggatattccagtctagaacttgctataaagcaaaatggtgaaaaccaaagcacttcatcccccactcttcagacgtcctagcctatgtttctgtgagctctgaagcaggcacgccagttttcatagcagaagctttgtgtttgctcttggcctgttaggggagcctcagacagatcataccagaccctccccagggagaccctcaaggtaaagtgatgtgctaggccatacatctgaaagaagctgggagtgactaagtaaacacactcaagagtgtgagagagtgtgagtcacaacactcaagagtgagtgccagggacagctctttcatctcttcacgtgctgtgatcctttggagcccctgggaagcagaatacagctggtggataccatggaaaccaggctggcatttcttgggctctgttatgttccttgtttataaagtcatagctgctgtgcaatcagtacatcacaggttccctgttacattgtctatgcttgtgacggtagatgtgccgtccaacatggcggtcctagcagcactggaagtgcaaactcaagtgtctcttaaaagtagcgatacaaatggcaggagaatgaggaaacagctacgtcattcaccacagcgtgtgattctgaccccccaaatgtgtaaaagaaggttagccataacagccttccataggctcagcacttggtagacagagacaagggagtcctgggagaagctggctggctagagtcatcagtccgcaagctctaggtttgaatgagaggcccagctgcacaaagtaaactacagaaagacaggaaaatgcctgaggccaatgtcaggcctgcattctaatacatacaccccacacgtgtacacacacattctaacatgtgtcaccatcttagacctgtgcacacagcaaagagaaggaaaaagcacacagtgttcctgcgatttaagagtgaattgagggatcacagtgtcttgttaataatcctatatttacaacatggtaattgttttcttctggcattttaagactggtttctgaagctgcagcatgaagatgccactatcttctatgttttctcagtgagaaccagctaccatctccatgatcagtgatttctcaagtctagcgtgtctccttctcagctgctcttcagagtctctggtttctcttctctacagcgtggtgtggctctgcttttcttagttcccctgaagtaggctagaaacttgctagtgtgtgtgagccctgaggtgtttttctgcacgttttctttgtcctctttctggaatccatactaagttagtttttagtttctggtttgtatttctctattgactctgctctctttatttctctgtcagttttgagcaatcaatcaatcctagctggtgtgtgttagagtatattaattatctcttcagccagtttagctgttgaattacttcaggtttttcctagtctgcatatttgagttcatctattccctgttgaagtttccatgtttatccaattcaagctcttttcctttatgtctttagcatacttatggcaattactggaccagttcttggtataaactctagcatttttgtttatttctgagtcgcttctcctcccattcatcctcttgaatgtggctttcatatttctgcttctctaagtgtctcatgatgtggcaagcacttgccataaacattggagtccacatttcccttcagagagcacggaccttccctgtgagacacgggaataaggtgctgatgatggtgatgcagttgtactagactcattagactgattccagcccactgcccagtgcaggtgcacattacaggaaggtcttgtaggtccagttggctccctctcggctgccatagacaggcaggaaatgctagcacagagttatataaggacaggagatgccaatgcatggtactgggaggacaggagacaccagcacacggcgctgtaaggaaaagacagaaccagtcccatggtcctgtaaggttcctgcctggtcttccagcctctcccggcacagggacttgggggtaggaagaactggtgttatggttgtgttccctatgcctgaccgtctgtggcccacatccatcagttagaatcgctcctcaggtcctcactcagcacagtctctgcttgggccaagtgtgagcaagctgcagaccacccatcctcaagctccataacctgtttcccaggagagggcttgtcctggcccttcttgttgaatcctggatttttagctgcctgccaatactcagtgtatgcatacataaggctttgagttcagatctcagcactgcgtaatgctgggcatggtggcacatggctgtcatgttatcccaccactcaggaagtggaaccagaaacatcagaagtttaaagtgatagtcagctaagtagggaatttgaggccagcctgggctacatgaaactctcacaaaacaaaacaacaaccaaacaaaacagaacaacaaaaacccaaaaaacaaaaaggttcagtgatttaataggaaagtccctagttttctatgacaattctgtgaaagcacattgtacccaggttaggtaaatacacacactgcatgactgcatctgaactaatgagacatagactgaggagctcaagcacagagtgatatttgatgccaagtcgcggtccttggaactggtgaaagggtggtgcttgccctccaaaccctcagcgcctgtgtacccctcttaaccctgcgtctctgagtttcctcacgaaacgccgctctgatactaagtatttaaagggaggcgagtcgttaggatattagcagttgtcctttacagccttttgtttatctagatacagatgtctgcattctgaggggagttttatttgtgcttttaaagttattaagtgaacagtgtctattcaaagtaatgtagactactgtagcttttgcttttagttcgtgaagtgactgagcctctgaacttgaatccagcgaaacggcctcgtcgacaagactgggatggagagttatatgagaacggctcattttattttgctaaaagacatttgatagagatgggttacttacaggtttgtatattcattttatacaactcttcaaagccttctgtgttgtgctctggagctctgggagaagcaaggttagcatctgggatgttaacctgcagcattgcctcccaggagcgctgtgggattcccaggaactgtctgtgtagtctgctcagtggaacactgagataaaaatggaacggaggccgagagctcctgccatccgggtttgcactagcccctcagtgtgtgtccatgttaggttacaagtagatcatggctgtgtggttaaataatttctatactttacaaacagaaaacaaccaattcagcagatctgagagagagtcgacccacctagttttctctctggtcaccttggctgtgtcagtctgtgtgctcacttgctgctcgcagtttggagaggttggccgtctcattcttagagcccatgtggctacgtcatatacttgaaaattggctcattttcactgttgacgacaagctctcttacagtggactatgagaaaccttacgtgggttccctaccccaccgtgcagagggaaccaccatggctctgaaaatggaatagtgaggcgctgtgggcacttaggagtactggctcctctcccagaggacccaggttcacgtcccagcagccacgtggcagcctacagccatcggtaactctagttccagcagattcagtagcttcttcttgtgcacagacacgaatgcaaacaaaacacagtctatatacatgaaaataaatacacttttaaacatgacataattcaggacagacacaacactgccaaaattgagatgggcccttattttacgaaaacagtggggaacaggttgcagagcatggatagaaggagctgagggcgggggcgggggtggcgcggaacgcggggaaatggccctgggtaaagcacttgcacaactgtgaagactgaagttcagaagccactaaatgcctggggtgtggtcctgcctgtaactccagtgcaaaaaagggagacctggccaccatggctacctagggtggtctgtcccaatgagtaggtggaaagtgattgggggactcccaatgtgactctgaggccttcacacgtgtatgagcacacgtacttgtacacctacacatgtgtatccacacacgggaacatcatgcactgaagactaatttagtggtggtccaccttctcaacatgcagaagactagttccaactgctagcaccaaaagaaaacctctaaatgttctgagaacaaaagattttttttcctagtctctaggacagtattgggcattcagttttggtgtagagttgaggaaggctagcgctctctctctctctctctctctctctctctctctcacacacacacacacacacacacacatatacacactatccctagttcttttctaaggacacctgtggtctagcccttccctaatgtgtagataaaaattgtgtttctcactgtaacaagatttgtgaaaacagtttttacttttcattctctcatatattacatcccgactgcagactcctccctcccctccttccaatccttcccccacccacctctcctctcccctctttcctctccctcagatccacttctccatttcccttcagaaaagaacaggcctcccaggggtgttaccaaacgtggcaaaacagcctgtgataagattaggtgcatacctcatttcaaggatggacaaggcaactcatggagggaaagggtcccaaaagcagtcagaagggtcaaagacagccccatcccactgttaggagtcccacataaagaccaagctacacaactgtaatgaatatgcagaggacctagggtgaaaacagtttttaaaaatttagtctgccatcaatgcgaggagaggcccttggtcttgcgaggatcatatgcctcagtacaggggaatgccagggccaggaagtgggagtgggggtatagggggttttggggatagcatttgaaatgtaaatgaagaaaatatctaacaaaaagggaaaaaaagttttccaacaattgatctggtcattgaaacaacatcagaggaaacattcctctctcagcctgtgccctggactctgcctcagcctagtcatgcactgtgcaccccgcggacctgaggcagtcggtacaatggtactgtaggtggatagtccaacactgtaggtggtactgtaggtggatagtccaacaacactggccagggaccagagacctgaaagcctggtgctgctgtcaggggacattggaaacttgtcatctggcagaggaaaagcagcagatgtcagtgtcctagacatctgctgtggttggagtgctggagggagggcgtcctctccaccctttcaccttaaatcctggctgtttaaaggaatgcagggaacctgcgcggtagacagaattcagaactcacttgtttggcttgagtctcatttccaagtgatcattttgggtgtgtcgctggcttactagagtctttgttttctcgatgtaaacccagatccaagctgcatacacacacatgagtaacactcagcatctctgttgtcttcagggtgggaaaatggcatattatgaaatgcgagctgagcacagtgtggatatcgacgtggacatcgattggccgatcgcagagcaaagagttctgaggtaaaggaaggggaaagcctgagatagcagtggaccaaagcccaggtctatctttagcaagtctaactggcctaggcagtgactggagacagtctttgtactcagtttccttgaatgggggaggtgtgcatatagaacacttgcaatgacttttgcgatgagctgggaggtgcagtctggcaagcagtactgcctgttggagctctcgttctgtctgcagagtgtgagtgaagtgaactgaagaggagtgtctgagtgacccacagcactgctcagagcagtgtctgagtggtccacagccctgctcagagcagtgtctgagtggtccacagccctgctcagagcagtgtctgagtggtccacagcgctgctcagagcagtgtctgagtggtccacagcgctgctcagagcagtgtctgagtggtccacagtgctgctcagagcagtgtctgagtgacccacagcgctgctgtctgctgctgcctgtggcaggaagcatgttgggactgttgaatttgtgctcacagttctgtctcggtttcttttagatttggctattttggaaaagagaagctgaaggagataaagcttttggtttgtaatattgatggatgtctcaccaatggccacatttatgtatcaggagaccaaaaagaaataatatcttatgatgtaaaagacgctattggcataagtttattaaagaaaagcggtattgaggtatgtgcccccttagtgtaatcataacctgcaagattctgattcagggagcactccagcacttaagagatttaaagctcactatttccatgaagtttttgaagtattgcttggtgtattcctagagaactatcaacacttgaaagataaaattgggctttttttgagccattaatattttgtacttagtcatattttaaatatatttcttccttttccataggaccttaaacaaggaaaatttccttaactagcgttggcaactagaaaggggcaagctccatgtagactttaaaatatggcttattcgtgtgaatggaactattaattcagaataacatagtgtatagaagtatgtttttcttaaaatgaagattaagccaggcccagtggtgcaaactggaaaccccagttactagggatcccgaggtcagggactgacgccgctcagcagtgccttgtctcaagttagacatggaaaggaggctggcctgaaactcagagataagacacctgcttagcatgtgtgcacatggtatgagaaggaaaaagtaattacagtcactaggaatgttcactatgtgatgctctgagcaggtaacctacagggagcaggctttgtgtccctgggcacagctggtgtggtgccttgatagccttggaagtgaagcaagctttgtgaggctcaggggaccattcatttgtgacatgagtcttcacagattcatcaggcctatctgtttccctctcctcctaacgaccccacttcttttccaggtgaggctcatctcagaacgggcctgctccaagcagacgctctctgccctaaagctggactgtaaaacagaagtcagtgtgtccgataagctggccaccgtggatgagtggaggaaggagatgggcctgtgctggaaagaagtggcctatctcggtgggtcatctgaggctctgcttaccctgtcagaagtgaccagaagggagggctcctaagtgactgatgtagggaagtggggagctcttaaggtgcagaccagagtactccattagtacagtctgggcccgggagaaggctggtgtgtaatggcagtcacttcccatctggtaaccagaggttgctccctaggatatgtctggtaaaaagagagaaatggcctttgaaagtcatttaacctctaactctctaacctccacatgagagccctggcacatgcttaccaccactaccccacccacagatatccattgacacagctgttccaagtctaccgtggcaggcagtgtgtcagaatcggctagtggactttctctagcacatactgtggagtcacactgtcaccaccaccgtcagtaagctggacgtgtcaggagtcgatgtcttagggctgctacagaggctgtacaatccaggcaaagggccagcaggctctgacacataacactttttactgtttgctttttaacttacacattttaaggaagaacttgggggacagtgccactgacagagagaaaaggagccacctcctgtcccacaccagcagcccatgcacacgagtggactgtgccagcatctgtgtttagtggcatgttcagagctgtgtgagatgtgcttagctgatccctgctgcatgcacacgtggaactagttgcctgaatcagcatcaagcctgtagagttgacagcctggtgctatcagcatggtcttaaagaagaaaagttgctgatgtgcacagtgactacacacagattgtgcacgaagcagacacggacagatgacaccggcctcacgaggcccacacgagcctgtgttcttgaggtgctgggataactttggagcccaatatagagaacagtccaatagcacatttgctatagaaagcaccacccatgtgatacataggattcctgctgtacccattttccatgaggctcaaagaggcttccatatgaatgactgtgtgctcatcatcaaagagtgaactgtactaacattagagagaaaaacagaaggcttcgcctcatataggaactgtgccatttatgtaggcataggcggagagtcagacttcagaaggcattgacaaaggagtagtgataattatcctggatcgtaacgtttgtttgcattaaagaaaatgctgctgtggtgaatatgtatggcttaaacaccccttcaccacacacacacacacacacacacacacacacacacacacacacacacaacttggagattaggaagtagagaatacttcctaaatgtttacttcagaatgcaagcactgtttcaaaaaggcacataagaatacatgccaggcctgtaaaaatggttcactaagagcactgctattctcagagaacacaagtttgatttccagcacacacagcagtttacaaccagctgtaactccagcccaggggatccagcgccctcttcaggcctccagaggcactgtatacacaaggtgcagagacatgcatgcaggtaaccattcagacacatacgtctttgaagattcctgagcagtgttagtactgtgctggacgtggtgctgtgtgcccataggcccagcatgggaaggcaggaggatcgtaggttcaagcttgcatctcgataactcttgtaagaagaatttaactttagacaggatcacttagagtaactcgcgtgttacttctccatgggaaccattcagttcagtacgtgagttacaggggaacatttctgtgggtggacactaagcactgggaggcagtgttttctcagtgctactggtagtcggatccagaatggtggctatctcactggtggcctctggtgtttcttctaaatgaggtattgggcagggcaggcaggggagggtggaatttaatatttatttcagtgcttgcagtgtgacagccttcctacacatactatatgacatagaagccagagagctgttgtagctgggaatggggggacttggattagcaagtgcaccatgtgggctgggctcctgatttttaaatttcaaaatgaaaaagacagttcagaagggcttggaaaggtggcttcagacctcagtctgaagagccagcacgatggcccagtggatcacaggacttgctccaaagcctcatggtaggaggagagaagcagctcccacaagctgtcccctgccttccgtgtgcacacacaccaagtacatgagcaagctaacgactgagagacctctgacactcacctggcctcctcgccgctgtgcccacacacgacgacgagtgttgacatacttggtgatgtttgaccataatcagttattaaattgttttaaggaattgttatttattgtgtgagtttgatcactatctttttattagctataactgcttaaaggcttgggaatgagggccaggatgtggtggtgcacctttaacagcacggcggaggcggagtctgcctggggagtccttccacactctacctctaaggaagctagagtataggccatagagaggaagagtgatgaagtcatctaaagctgtaatcactccacatgatagcttggacccttacgtgtatttgatttttcactcaacaaagctatcatttgtaattcaagtacagagtttctgatcattataatacacacagtaggtaaagggtatgctccatgctccctccagatcccagtcacacttggacttaaagggattgttttgttctgtatgactgttagtattcctatggatataactattactggttatggtttgtatcgttttgctggaacgttctgctttcatagtgaatggtctctgtctcacaggcaatgaagtgtctgatgaagaatgcctcaagagagtgggcctgagcgctgttcctgccgacgcctgctccggggcccagaaggctgtggggtacatctgcaaatgcagcggtggccggggagccatccgcgagtttgcagagcacattttcctactgatagaaaaagttaataactcatgccaaaaatagaaaatgttgtagtgtgggggaaagggagattgaagccttttccagccattttgcattgttttgatcaagtcccgaagtgtaatctgcaggtgtgtggtctgatccgtgagctagttctctattctcaaagctgagttttctccaatcatggttcctgaacccatgacataatcatgtctgttttcctcttgatgcgaggtaattaccgagggattgacctagtcttgctccgacctcataaacaatccactctgtattgtgccctgtcaaactagtgtgtgtggtgttaatgatgctgggattttatttattgtaaagcaatgagtctggtaagacacccctgtgttaataaagttaccgttcacagacttgaagtttctgtactgtaagacctgtcctaggcattcccttcaagcactagctgtatagattcagaagcaagagccgacaccaagtctgtagcacgctgactgctttgagtgtgcacacagtgagcgctcacacaggtaaatacaggggtttaaatacattcaagcctgtgcttacttgatttagagagggcagaatgaaccattggcagctatggctgaagcaatgctaccttcatatactgcactcaactttcactgtgacttctgtggccaatgcagattgtcctggatcccaagagctaggcataaatatagacacttaacaagcaggaaatgtggctcacagaacatttacaactctttccaccatcaaaaaaacccaaaccattagtgctgacaagtacggcccactgtatgttgccagcagttctgtcaccgtgggtctgcgattctgagtcgtccctagaaggcagacacaagttaggaagagacaggtggctttgtcatcatttctttgcctcttgtcctgactttgttcttgacttcctttgttgtttgattgtgtgtgccccaaggttctcgccccaggtttcacctctaaccttagcacggacatctcagatctaacaacccctagtctgtaggtgagccctggttatacacgagacagctcatgtaacaaaccagagcactggccttagtctgtgagctcactgaccccattgtaattgtcacggcctagggactatggtggcgcatgcctcaggcacatgtctcaggaggctgggacaaaaggatatggaggtcagtgcgtgtgaactgtcccagataatttaaagtgacttaagatggctttcctcagtttctcctgcttaaatagcaagttctgagtttgatgctgccggcccaacaccctttcaagttgtgtgaatggtttttctaggtcttttgttcacatgtttgatgttatcttttgtagaattttctaggggctccaggctgaccacagaaaacaaccacttcaggtcaaacactggccacaacctagtattttcagcccacttccgattactctgggttgctcccagtcagtcaaggtgttgtgttatttcccaacagtgcccctgtttagcctgttgtcaagtctcacccatatcagcatgagctgttcattcctcagaaaagttctccctcggagccactgtgagagaaaataaagtaccctagggcccatgttccagtcacccaaactgtacaaggcaagaatagagcttcactgttgaaactcgtacttacttacatttccactgatagaaaccctggtcaagaagatgtgtgttcagctgtggcaggcagaagcccacagatcaccactagatcctcccaacaggaaatggccaggcgctgatagagacacttttggagattgtctgaacagtaacccagactcatccagagaacctcaaacttcccaaagcagttgcagccagataccatggagaggcgattgagtggtgtctgataaagccaaggatgggctgtcgggtgagaagcacttggggttgctggcagggctgctagcaggctttaacaggatctggatcttgggatccaagcaagagaatccccatggccataggcagagggggaagagagctactggaaactccttccttactcctcagaagactgcgagccaatgtgaaggctcttgtccctcagctcaggagaatccattataaacaacaaagatggcttcatcaaagaagggagcaggctgggaacaccacaggagacaggaccagagcccaggaggagtcctaggagactggggcagcgtaaagagtgatcatttcaaaacagcccagcttctactacaccccagaagctcaccgagtctccagcaaagtaagtgattggcatgccctgccctgacacacacactcactcacactaaaaatgaattaaagggaaatagtggaattcaaagacatggagacaaaaaggtctatgacaccaagtcaaaagaagtagagcatagataggaatgtaagcaaaacagacgaaatgtgtgaagcaatgatggccagaaaccttccaggttaatggaaagaaagccgtggtgggatctacaggcagcagggagaacaacccagaagaatgaagatcactccaggtgggcttcatgggagcaagaacagtggcctataatgtcggaattcctataagaatggcttccaatctcaatctacatccaatgggattttcattcaagattaaaaacaataacaatccttacacacacacacacacaacaacaacaaaactcttcattgcccaggagaagaggagagggtggtggtggtgatgatagtagtagtttagaaagaagaaaatgccagaggtagattacagtgatggctctaacgcaataactgtacagtgtttatgcagtgatggctatgtaataactgtacagtgtttaaacagtgatagctatgtaataactgtacagtgtttatacagtgatggctctaacgcaataactgtacagtgtttatacagtgatggctatgtaataactgtacagtgtttatacagtgatggctatgtaataactgtacagtgtttatacagtgatggctatgtaataactgtacagtgtttatacagtgatggctatgtaataactgtacagtgtttatatagtgatggctatgtaataactgtacagtgtttatgcagtgatggctatgtaataactgtacagtgtttatgcagtgatggctatgtaataactacagtgtttatacagtgatggctatgtaataactgtacaatgtctagataagggatgctaagctgagctatggacacaggatgaggttgatgcatattcataggaaaatgagtcctgtggtggtgtttaagggtgtgttgggattctttctaaacatacatgttaagcctccagacaatcactggaaaatactcgcttatagaggctgaaaagatgccgcacttcctgctcttcagcaggtcccagtgcattgccagcatccatgctgggtgcctcggtggctcactgagagctggtaagtccagctccaggggatctaacaccatcttctgacctccacaggcacctacagaccagtgcacgtacacacatgcatgcactgacacagatgcacataacatttttaaattaaaaaaataaagtaaattcaaaggatatgcagagagcagagcacttggggttccaccttacctccggagttgctgagccccttcctggtccccagcagggatctctttccaccctccacaccctcctcactgctgatagctgagcactagctgtgtcccctactttctacctgtcttaaatatgccctctttcttcacagctggttgctccatattcatgtgtattttaaatgacaaagatcagaagagaaagccaatctgtttactgtcactatcttgttccaagctggtgggtaccttaaattacacatgtcacctcttagcctgaaggacacatgcctctgcttgggggagggggagattgcctgtagacaaacctcttgtgactttgttcattcacccaaggtgactcgctcacttttcatacacgttcagtgactgtttggctacctagcactgttgccttattgctgcagaccataaaattaacctctatatatcttttcttttaatccacacagctctataaaggaagtatttttcttcctctattttatagatgtgaaaattgagcgatagacagctataactaccgggggtcagacactaggtggcagctctagaacatactaaggcagcagatgggcgattggtaaggcttcttcggagatggcccctcagccaacaccaaagctcttaaaacaacaattcactataattaataattgtgcaaatatgtgtgctagccctcccctggcgtgagaggtgtagaacccggggcttcggtctaatagtctgcatattaggaaagcccactcagtggtctgtgcgcacggagttgctagaaccctgtagttgaagaagttggaataaatacaacagggtaggactcaggctcagaaactgtcccatgccctcgttcctcaacactctcccatgacaatcgtcctctggttctcagtcagcctcagacatcgattgctaccagccctctcctacagacccagacctgttcggaggtgaggttcccagtgctgactggccacgttagtatttccaagatgtataatccctggccttcatgacaccctgacccccaaacaaacaaatcacgagagcattcatgtccatttagcaaaaagcctgatgctctgacaggtagagagcaagacaggaaagtcgggacaggatgtggctaaggaaatgtcaccatgctgctatacacggtgcttcccataatgcactggtgttctgtcatcatcttcctgtctctctggggtctgttcctggaaaggcacctcaatttaatgcaaggggatggctttcccaaacctcggccatttgcttcacaggaaatagtgaggccttcaagttccctttctttgatttgtgcatttcacatttgttatagcagaaacccatgttcagacaaagctgtgcagagtggaacagaagagagaccaacggctaatgtgagcacaccatgccttgtctgtccaggggagttgcaggcagttcatgcccagccgtaattagcccttcacttgattggcacctctggaggcatactgtgacaaggcttgtcaccctctggcctcagttttctttgcgttcggagttcccaccggtctttggagtctcaggggaaacatcactgaagcctaatgaaggctcacagctcaggagctgaccatgccaaacaggatacaattgaccttcattaggaacaaaggaagaaagaaacgagtaatattaatagtatccatttgcataattgcctgattgaaacatttctgtctggggatgaataaactcacttctcagtctagcctatgctacctagcaagggttagttgaccaccctcatttattttaattaaaatcccacttgggccaattactcaggaatataccctttctccccaaagcctgtctaatcattagagggcattgtcccacagcttggctgaatgtcccctcagcggtcagtgacaccaatagatgctggtgacaggcgatttaagtaatggagaatgactacagaccactgtttgcttttctctatgggagcaaattctatgtaagttaatataaactgccgaaataaagagcaaatttgaaatgagacaaaatcacggtttcataaataaataaatgtatacacacatatttatcctgttattgagtgatgcaggatttgatcctattacgttcaaagagtctcctcttttatcccaaaggtaatggtgataacagccccaagattactaagggtttgtaagccctcctggctgactaccactaacgctgaaaacttgaaactactcctgcatatgtttcaaagaaactgggggaggtggagagaacccaaaaacctgctgatatccatttgcccaaatctgtttgttatagttttgagatgacagccttcacgctttgggaaaggaattatccagattctctttatctaaatggaataataattagttgtctctaattagcttcctaattggctacttgtggggcttgctgaattgatggctcattggctcctgtgtcctgtagcttttcatccagagaaggaagccacgggagccacttccatagcctactctgtggcctgagaaaattcctccttgatctgaacctgcgcagagagagccgggggcgttaatccctttacgaggctaaagtaaaaggcaatggtgtgaaaattatctaaactcagtattagtcccccttggcgctgatgtgcagttggttgatttttattggtattttataaatgtgtgaagaatttttctatttgatagtctcacatagtacaagaggagattgccaggaaaagataaggttaaggaggctggaaagatggttcagttgggaaagtgtttgccacgcaagcctgacagcctacgctctgctcctcaacccccatagaagtccaggcacagtggtgtgcttataatcctcacaaacggggaagacagaagcaggagggcacctgatccttggggctcactgctcgctgagtcttaactgctaagccagaagttcaataagaaaatctcatctcagaaacaaggtagagagtgattgagaaggatgccaaatattggcctctggcctacacaaacacacacatacatacacacccctatacacatacacatacacactatacacacagaagaactttaaaaatacttataagtatgccatggtactatttaactttcttttgatatagaatctcactgtagcccaggctggccttgaattcactccataagtaaggctggtattgaactcaataccagatccacactggcctcaaatttagcaatcctgctccagtatgctgggattacacgaatgcagtactgtgcccagctgcctgctcttctaccatagtttgtctttcttcttgcctttctgtttgaagacaaatgatttcactacactcagattagattatcttagattatgtaaatagtaactatgcactgtataccttaaaaggccataagaaaggactttttaatgtcagctcacacattcatgtttacaggcccagtgagatgaaacattggaccagcgtgtcttcactcaccattgagcacgtccatcctgcagaagagaggaggagccactatggggagacaggaggcaggctgaacactctcagtaagactaggaagaaatgactagctagtccagtgtgttggagcttaaacagagtggggcgggaacaaacaatgaggtttaaatgcagacatgaagcattcagcaaatacaaaaccagggttgtggtatcagaactgagctttctggaagattaagaactggagcttgtctgggaacccagatcacaccccatggttgtcgcacatctacttggctggggtgggctggtccgagcctggtgagcatgcaatgggaaaggataggacgcttaactagtaagggcaagagatagacatttaccttataatacaaagctggaacggctaagagtcggaaggaaaatggtgtgaccctggagtggtgaccctggagaatccataggagaaatgaaaatggagggcaggacattgggagtgtcagcagtgtcagagaaggcttttggagagggttagataccatcatgaaggggaagccggaagaggaactcaagtctgaacatgaaggcaggaactgaagcagaggccagggaggagccctgtttcctggcttgctcccgtggcttgcagctaactttcatatacactccaggactatctgcctaggggtggcatcacccacagtgggctgagctctcctactcaatcagcaatcaggataaagcccccaggcttgcctaccagccaatccgatgaagccatgtcctcagtgagagtccctcctcccacatgactctagcctgtgtcaagtcgacagaaaactaagtagcacgatgcgcatctgttgtgttttataaaaaagagaaagaagccggggatctgtttggtagaggcacggtgtggtgggggggagggggtgcnnnnnnnnnnnnnnnnnnnntcccagtgcttagtgtccacccacagaaatgttcccctgtagctcgcgtgctagagagagagagagagagagagagagagagaggctggccatgaacacgtgaagaaagagggtgaggggaatgggggaagaagagaggaagagagtgaggaggggcaagcagccccttttatagtgagtcaggcacacctggctgttgccaggtaactgtgaggaggagcctagaaagaatgctgacagcatcgacctgcttgcacactcaggacacctcattctcattcgcactggggccccggtctccccctcagcctctgccagggccctgcttctccatcccctcttttttcctctttttgtgtggatcatgctggtacatgaaacatctcatctgcctccttctaaaaggttctctgtggaaacctgctagagacagtggttttcagccttcctaatgctgtgaccctttagttcctcctgttgtggtgaccccccccacccataaaattatttttgttgttacttcataactgtaatttagctattgctatgaactgtgatgtaaacatctatgtttttcaaccctcttaggatgccccttatgaaagggtcagtcaaccccaaaggggctgcgacccacaggttgagaaccactctactaggcggatgcttggagccaaccatcaggctgagctcagggaacttggtgggggcactggcagaaggactggaggagcggagggcgattgcaacaccattggaagaacagcctaggttggcctgaagacccagttctcccagagactacaccaccaaccaagaagtgtgtacctgaagggacctttggctccagatacatatgtagcagagaatggccttgcccaacagcaacgggaagggagacccttggtccccagggaggtttgatgctccagagtagggagacgggggagcggtagggtgggagagtgtgggtggatgggggagcactctcatacaggcaaaaggaaggggggagggctgatgttggttgggggagggtggcacagaggtaaacaggaagtgggatatcatttgagatgtaaacaaatggaatgattaataataataataataataatttaaaatttcaaagagagagaaccactctgcttcagtttgagaagagagagtcttcaagcttccttctgtgtctgtggcacgcataacactgactgatcatggacagagagtttagattcttggttacatccttgggttactgactatccccaaattcttatcaaaattgaattacagcttaccaacgttactttacagatctagaagagtaaaatgccatgagatgtttgtctgatcttacttcgggggggggggtccttctgtgctatgaggagatattgcacccttgtgggacttcctttcttccctctcagtctcatccgtctcctgagcctgactctgatggtctcgtccaccttggtcaccaagagcaggtgtgaagtcagctctgccatgtgtcctcctagctccagtgagaaagctgcaccagatgaccttgcgttgaccttcaatatcattatttacttgaagaaggtatgtggctatagccactagaaaccattagaaatgttatttcgaaggtaagagctgcacaaagtcaaaaagaatgctctttatttgtaacaaatgcatgtgcacagaagatttgtacaaactgaacttcttgcagaattatcaactatatacaaaagaccccaacagattggtcactaaacatccacctaggttcataatacacttagggtataaaaatcaaagagttcagctgaactcagcaaatcaaactccctctttgagttcagcattaggagcaatcatagtacaatcttgatttctcagcaaggcttaggagattctactacagcggctgtcctgagaactatgtgggtgaacactgaagttcacggaggtgtcattacagtgctctctagtggagggcatcggtaatacaccttacagagagctgcagcaactggattagtgttaggacccagtctgcaggagagcatgcctactcaaaacactataaagaaccagaagcgtagaaacctaacaggaaagtccattttcaaaattgtaaaatgagaacatttgtaatttgtggtaacattaagaaaatgcaggcgtgcgcaaccacgttcaccaatgaatgagaccaggtattggg

SEQ ID NO: 552 - DNA, 1743 bp, Mus musculus
ggtgacggcgcggggaactacaactcccagcgtgccccggggctggcggagccgtgggcgtggcctacagctgccacagcaggcgggcggtaccgagtggagtcggcggggccgagctcccggatgtggagacgttggagcggcggcgtgggaggaagatggacgcgctggagaagggggccgccacaagccgccgcacctggcagcgctggtgctggcccgcggcggcagcaaaggcatcccactgaagaacatcaagcgcctggcgggggttccgctcattggctgggtcctgcgcgccgccctggatgcgggggtcttccagagtgtgtgggtttcaacagaccatgatgaaattgagaatgtggccaaacagtttggtgcacaggtccatcgaagaagttctgaaacgtccaaagacagctctacctcactagacgccattgtagaattcctgaattatcacaatgaggttgacattgtggggaatatccaagccacatctccatgtttacatcccactgacctccagaaagttgcagaaatgatccgagaagaaggatatgactctgtcttctccgttgtgaggcgccatcagtttcgatggagtgaaattcagaaaggagttcgtgaagtgactgagcctctgaacttgaatccagcgaaacggcctcgtcgacaagactgggatggagagttatatgagaacggctcattttattttgctaaaagacatttgatagagatgggttacttacagggtgggaaaatggcatattatgaaatgcgagctgagcacagtgtggatatcgacgtggacatcgattggccgatcgcagagcaaagagttctgagatttggctattttggaaaagagaagctgaaggagataaagcttttggtttgtaatattgatggatgtctcaccaatggccacatttatgtatcaggagaccaaaaagaaataatatcttatgatgtaaaagacgctattggcataagtttattaaagaaaagcggtattgaggtgaggctcatctcagaacgggcctgctccaagcagacgctctctgccctaaagctggactgtaaaacagaagtcagtgtgtccgataagctggccaccgtggatgagtggaggaaggagatgggcctgtgctggaaagaagtggcctatctcggcaatgaagtgtctgatgaagaatgcctcaagagagtgggcctgagcgctgttcctgccgacgcctgctccggggcccagaaggctgtggggtacatctgcaaatgcagcggtggccggggagccatccgcgagtttgcagagcacattttcctactgatagaaaaagttaataactcatgccaaaaatagaaaatgttgtagtgtgggggaaagggagattgaagccttttccagccattttgcattgttttgatcaagtcccgaagtgtaatctgcaggtgtgtggtctgatccgtgagctagttctctattctcaaagctgagttttctccaatcatggttcctgaacccatgacataatcatgtctgttttcctcttgatgcgaggtaattaccgagggattgacctagtcttgctccgacctcataaacaatccactctgtattgtgccctgtcaaactagtgtgtgtggtgttaatgatgctgggattttatttattgtaaagcaatgagtctggtaagacacccctgtgttaataaagttaccgttcacagactt

SEQ ID NO: 553 - protein, 450 aa, Mus musculus
VTRTTTPSVPRGWRSRGRGLQLPQQAGGTEWSRRGRAPGCGDVGAAAWEEDGRAGEGGRHKPPHLAALVLRGSKGIPLKNIKRLAGVPLIGWVLRAALDAGVFQSVWVSTDHDEIENVAKQFGAQVHRRSSETSKDSSTSLDAIVEFLNYHNEVDIVGNIQATSPCLHPTDLQKVAEMIREEGYDSVFSVVRRHQFRWSEIQKGVREVTEPLNLNPAKRPRRQDWDGELYENGSFYFAKRHLIEMGYLQGGKMAYYEMRAEHSVDIDVDIDWPIAEQRVLRFGYFGKEKLKEIKLLVCNIDGCLTNGHIYVSGDQKEIISYDVKDAIGISLLKKSGIEVRLISACSKQTLSALKLDCKTEVSVSDKLATVDEWRKEMGLCWKEVAYLGNEVSDEECLKRVGLSAVPADACSGAQKAVGYICKCSGGRGAIREFAEHIFLLIEKVNNSCQK

SEQ ID NO: 554 - DNA, 39451 bp, Homo sapiens
  misc_feature (1)...(39451): n = A,T,C or G
cttaataaaaggtaaatatatttttctgttacgattttcttaacaacattgtcttttctctagcttactttattgtaagaatacactgtaaacacgtggaacatacaaaataaatgttaataggtggtttacgttatcagtgagtcttccagtcaacagtaggctgttaagtagttaagttttgggggagcaaaaatttatacacagatttttgactgcacaaggggttagcactcctaaccccaacgttgttcaaaggtcaactgtatactaacaaaatttcctgaaataaaagtgggtatgaatctcttcagggaagcaatcaaccctagctctgaagtcttaccatttccccagtctctgcttaggaacagggcattggtctcttctgctttcggagtcttcaaggttacctggtatttttgctcccctccttataccagtagcctggtatatattctggacacacttaagtgaaaagaggagttttcttttagtacatagtacttttaaaatacacgaaccaaagctacatccgtacacatgtacatgtgtccatgtatatgtacacatatacatgcgtaaccaaagacatatatgaaccataatagggtaagtgtctgtgaacaggaagagaaagttagtggggagtaagaatgaaagggaaggccgggcgcggtggctcacgcctgtaatcccagcactttgcgaggccgaggcgggcagatcaggaggtcaggagatcgagaccatcctggctaacacggtaaaaccccgtctctactaaaaatacaaaaaattagccgggcgtggaggcaggcgcctgtagtcccagctgctcaggagcttgaggcaggagaatggcgcaaaccggggaggcggagcttgcagtgaaccgagatcacagtaacagaatgtaataaacaagactgttatctcaaatctcatcaccttaacttaggaaacaaaacaaaacctgctgcccaaacagtgagaaggacaaccaggtaatagggagaatacattagtatttttcaaacattattagtatttcaaaatattattctactacaatatttttacttgtttccatttcatttttgattggtcatttagagaacaaagtaaaattctctatttttcccatttcctggactttctaatgatttcagatcaattttatggatacttgtcatttctcttaggtctagggatatgaatgctgaatttataatggctgtgtttcaagattttattttttgtcagttgtttggaagctcaaacacattttcctagtgtcataatattataaatgttagtgaaaggaagtggcaatgtatcaagtataaaaataaagaatgtctgacagttgaatgcatgaagattgaagacagcttatattatatattttatttcccatatgtcatatttaataatttacacatctgttttcttccatgaaatcttaaggttctttacagttagagctgtgggttttcaaaaaaaatgtatataacctagcacaatacttagtgaatgtgttttgctcagaataggccttcaataaatgtttgtttgatgaagagatggatgaatatattgttgttaacaacatttaaagtgaaaaacagttaaattcatttgtattctatccttctatccttctcaaaaggagaaagaaattaaatctttgaaacaagattaatttcagtgtttttccctcctacatttcaagcccactaggtaacatagaattgatatgacttcatagataagaaggtcctgttcaacgtgcaagtgaccaaacacttgtaagtaaaagagagtgaaaaacaggaacttgtgcattaatctaaccctgtaaaacaaacaaacgaaaatagtacccacagactataagtgctcaggttattgctctggcataccatagcgatgtgcaataggctgaagccagcccccagggctcaaatcaaggcatccacagtcctgagttccttctggaggctccagggggaaattatatccttcccttttcaagcttttagaggctgcctgcatcctttggctaatggcccctttctctgtcttcaaagccagtatcttctctcctccctgacccctgctttccatttttacaaggtctctgattctgaccctactgtctccctctttaagggcctttgtgattacactaagtacattgtcctcacctggataaaacccagggtcatcttgttatctcaagatccctaacttaaatgcctctgcgaagccccttttaccatgtaaggtaacacactcacaggttctagggattcaaatttggagatttttggagagccaatattcagcctactgcactgtccttcagccttcatgaaaacaaagataattgagtaattcaagacccatcaccatgtttgccaatcattcgccaacattattaagtttggaatcaaactagtaataattgtaacctaagtatcagttgtgtataagtcctcagagtccttgagcctggtgtggttacaactgaagtacaattttactaaaagatttaaagaaaatttcctccaactcctgcattacatataattgggtagccattatctctccatgtttctcagagcacttgggaggcttgctcttctgctcatcagcagttctgacttcttgcttttgcagtattcacaatcctactcacatctggtatcctgtgctttctatgcccctttaacatgctctcccacatgctggacatagccctgaggactgcacttccttaaccctgaccctaatccagacagaggctatctggatagctgattctagttgaaacaggaaggcacagaaggtgtttacagcaaagcacagcaggaacacagcaaacatcttaaaatgccctaattctagctcatcctggccatgccctccacctcttttatatggagcctctcttggtattatgctttaagaaaatcaagcacttcagttattttcttatgaaatatgttattttgcatctgcttgtaaactacactttgttgacatacaaatattttaataactccatttgttggactcttattatatgctattcactgtgctaaatcctttttatgcattgtcacttagtcttcgaaacaaccttatgatgtgatcattattattatcatatctatgagacagatgagaaaatttagactcatagaggataagtaattttcccaaggacagttcactcataagtggttaaggaaagatctgaacacataggccattgagcacaatgcatgcacacatcacatcgtggcagctggagaaatggacaatgtgttaactaggacaatctggtatttctggcttcttcccagggtcacagattcctacttatctgaaaggagcaatgctatctagtcccattcccacgttgacaagcagcagcacaagtaggcagggacacggggcaactttgtgacatttcctatagataactcacctttgtctagagcctccttttccccaacatgggctccttcagcaatggggctggcccctgttgatatgtttctgtgtgacttggggctactagctgtcttctgctcaagacatctggggacatagatctggtaagatgacccaccctcttcatcctttgatgaggggttacacttttgtctttacatccttggtggttccaattggaacaattccttcctaccctactccagccttaatgcctctctagtgagtgtgtggtgaacagtggaattctccatcagcacccttctaggaagtaacctgggaggatatttgatattaacagtaccaactctcttcttggcctcactcctgaaatctcatctactatcttgcccaagggccccatctatctaaaagaagagaacatgctataaagatatctctcagtagattatatctattctgagtctgggtagatgctagatgcctctatttttttctctccccatcaaattcaactttagtaaatcattcaagctggttttcatagcataagggcttagaatgctgcttctagggcttaagactacattcaaatgaaaccccgtctctactaaaaatacaaaaattaaccaagtatgatggcaagtgcctgtaatcctagctacctggaggctgaggcaggagaatcgcttgaacccaggaggcggaggttgcgttgagcagagaccacgccattgcacttcagcctgggcaacaagagagaaactctgtctcaaaaaaaaaaaaaaaaaaaatcttcccttgaccacttgccagctgtggggatttgaataggagttaaacatctcgaaatgaggctcggtttttttatctgtaattggggatgaagttaagtggttaagagttgttgagggataaaatgagataatgcatgtaaacactgagcagtctgaatgccatataagttctccataaaggtaaactgaatatgtttaggtatctctagaaaatgacctttctccattaatattatcaaagcagtgagcatttttcattcatcgtatcgcagggtattgttctggaagcattctttttccagggctgctaggcagaactttttctggttttggtggtcttaaatcagtttgagggctcggttctatagcttcatgcccagaaagttcaacttttctattactagccaaagccagtccttccacctagaattagattacatcccctatggtctaatcaaggaaattgcttcagcagttcttccttctcttctcgttatcattaattttccccctctctattggattacttttatcaacacacaaagatagtatcatttcccacctcttaaaaaaaaacaactcttttgacacctatttaatccttcaactactatccctttcctcttttaaccaaaactcttcagttgtctatacttgtgatctccacattctctcttctcattccctcctcttattccctccttaatccattnnnnnnnnnnnnnnnnnnnntcctttttaggttgacaccatgtaagagggagaatatattgtcatgtgctgttgtgtttaggaatgtggacgcactgttgctcttaagaaaagtaagtccactggttttgtggtggccaaaaaaacctgattagagtggattaaggagggaatgagaggagggaatgtgaggagagaatgtggaatcatgattatagacaactaaagagtttttttggtgtaaagaaaaaagagaaaagggatagtagttgagggattaaatgggtgccaaaagaaagagcttacttggtattaggagagaattacgagtcaggatatgcaacttatggtggttcataggcacatccaatattgtggtaagggtaaggttctaaagacaaaagagagaaagaaggccaggcacggtgactctggcctgtaatcccagcactttgggaggccaaggtgggcagatcacgaggtcaagagttcgagaccagcctggccaacatggtgaaacactgtctctactaaaaatacaaaaattagccaggtgcagtggtgggcatctgtaatcccagctactcgagaggctgaggcaggagaactgcttgaacccaggaggcggaggttgcagtgagccgagatcgtgccactgcactccagcctgggtgacagagcaagaccctgtctcaaaaaaaaaaaaaaaaaaaagagagagagagagagaaagaagtacatacaagttgtttcgaaacagaaaacattggttacagagtcttatggcagaaattgacatctgtttattagtggagacaggcaagtgttcttatgcaagcagctagctgtccttgtgtggctagctttgtgtccttgtgtggctgctagctctcattgtatgactcatgtagcaagctgcactttgaaaaaatttcctgtggtatttttttggtggaagcatagtgcatgagtgcccctccctcatggccttctggctctattatcttagggttagacataagcaacttcattttggtattgataactttcacagtgacaatcacagcatttgatataattgatcacttttccctccttccattacttttattcgcatagatttcagggtaccctattggcttctgtttgtctcagtctcttttgccatgtcttctcatttcgttaacctctaagtgttggagacccccagggcgcagtcttcggacttgttttctcttctgttaacttttcaatcttagctgatctcatctagtttcttctcttttctgtctgccatcacctctctttctcatctagtcctatggctgagaatagtacccaaatgctgatgactcccaagctatattcatatcctagacccctcctataaactctagggtaacatattcaatagcccactgtttatttccctttggatagctaatagatatttcacacatggcatttataaaacagaattcataattttgtctccaaaccttagtccttcttatcctttccatctcggttaatagcaactccctcctactaatggtcaggccaaagatcctggaatcacaccaattttcctgtttctctcatgcatttcacctagtctgtcagaaaatcctattagctatacttttaagatatatccggaaaatttgagcacttttcatcacctcagtgtattttcagtgcccagaaaagtgcctgacacagttgtcatgcaataacgatttgttgaaagaatggcgtgaatcaagttatatcccttctatctgtaacttccttaacaaagctgaacacataaggtctttatgtgctgtaatctggcccacgcgttcctctctattttcatctttcgccactaaccaaccagtatattctgcttcagtcatagtgactcacttcaagtttcctaaatcatcatgtagtctcattcctctgcaccttgcacaatgccattccctcagctgaggtcttttttgtactttaacaatctttcaagagtcatctcagcaaagaaaagttttactctagccgaaatacctccctctgtgcttgcctacctcatgtacactctttcacagcacaaatcacactctactggggtgtgcctgtctccctgtcataatgctaagttcgctgcctttcacctcttggtttggtatttttaacgtgtagcacagagcctggcttttggaatgcagtgaatgtgaacaaatgagtgagtcaaaggactcctctgtatacaaagtttgtttacatacaaaatcataaaacaagagataatataaggatatattctttcacaataaatacgaatgaattattcttcagcagcaacacttcatactgatctttaaaggaaagatgaccgaatatttgctttgagagtagtttattttgttcctcaaaactaatccaaagaaaaagacaggataacccatcctcttcctcttcctggaacaatcattctctctttggactaagtaaaaatattgtaaaagagtaaactctaatttcattttttaaaattcatcaaatttctgtgtgccatatgctgaactagatgcatcaccttccccttctactaccaccacctctctctcttcctttgtctccgtctctcaagattgggagtagctaagtgtcaggtctaatcaaaattgtgctgtaaccatacaaaggatataaaatgctttattatcataagtttgcaactatattttaaaaagcatgcgtgggcagagactgaaaaagtaatatgagaggcagttcaccaatgtttactgagcagtannnnnnnnnnnnnnnnnnnnnnnnnnnnnnnnnnnnnnnnnnnnnnnnnnnnnnnnnnnnnnnnnnnnnnnnnnnncagtactgtgacccatgcattgttctggatgagaagattacaaagaaggaacagtccctctcctggaagagttcaaagtctcttggtatttatgtaaatcgctataatctcatttgataagtaacagtggtgccacttgctctgttcccagcttagaggacaccaatatgccccaggagtcaaaactactcaggtgtctgtggtccactaggatttatgggcctgtagggaattactgtggagaagggcaactaaatcattaataggaatcaagattgttattggggtgtagtaggggtcctcacatgactaccaaaagctcagtgctggtgtctctgaggcacagcaactgcaaaggccctactcaaagagccagtgtatgggggcaagttgtccccttgcccttcagtgctggaatggctcatagagcctgcccctttcccaagcatggcattgatgtctgctcacagcctcccttatctgtgtctgcatgaagcaccttcttccagcaccagtcccaggaagggctgggccctcagttaattcacagactaagagatgtaaagtatccagtacctctcataggacccaaaacatcaaagacttcttctctcccctcaaaaatggccaagacctgagaagtacaaaatccttttgccctctgggagaaggcaagccgacacactacaatccattctttctgtttgtatcagcctccatctcagaaatgtaaaagactctacttccaaatataggcttgcaaacatgctgaaagacaaaatgcatgctaggtcagagatgcctgctttaaagtctctttttttttttttcctaagagaggtgtgtgtgggtgtatgtctttgagcctcttggctggatcagggtttaaatgctcaggcgtggcggctcatgcctataatcccagcactttgagaggctgaggcgggcagatcacttgaggtcaggagttcaagaccagcctggccaacctggtgaaacccccaactcaactaaaaatacaaaaattatctgggtgtggtggtgcccctctgtaatcccagctactcaggacgcttgagaatgggtggcagagggttgcagtgagccgagattgtgccactgcactccagccttctgggggacacagtgagaatctgtctcaaaaaaaaaaaagagtttaaatgatgcctccagagttctttctctttaatccctacatgtcattgttctgcttcctcagggagaacatcagtcttccagcccatttcagaacagcaaagcccccctgccaccctaccctacccttgccctgaggcttcaggttaacaaggtccttagcacccagtcagcacgagaaagatcctttctttccaagactctctggaaaggactccagtgggctctgcttggtcatatgcctgtccctagaccacaggtgtgttaaggaaaatggggtgcgtagatggaccagcttgggtcacacacagtgcagagaatgtgagggaaaccctcaccggatgagagagggatcaattcctaaaaggaaaagatttttagcagacaacaaaacaaaaccaaaaaaccaagtgtcggccacactagaggtgaccagtaaagctgacttccaaatttctgctgctagggaatgctgatgtcgatcaaagtgcggagagcatatgaaaaatggagtttttaaaacgttgagtttaaggcgcctgtaggatatttgaatgagctggtcagtaatttcttggaaaaaatgacccaggggcattaaaaaaaggtgtatgtttaaaatgtacattttaaaatataaaatggattcgtgtcagggtgcatcaaggtatgcaacgggaaacccaccacaattctaaagtggggaagttcttcagcaattataaatactttttttcttttttaattttagaaatttacagacacttgcaagcaccccaaaagccgcacttcctccaaatatctctggactcccactgcttgacttagttttggggtcacctcatcagagcctacttggcctactggccccagacgaggcggccgcggactacaattcccagcgagcaccgcgaggggcgggggagggggcggggcgagggacggccgcgcgcgccagctgccaggcggggatcgggcggcgccgagctgaggtggtgagggactagctcccggatgtggagaagctggggagaaggcgtgggaggaagatggactcggtggagaagggggccgccacctccgtctccaacccgcgggggcgaccgtcccggggccggccgccgaagctgcagcgcaactctcgcggcggccagggccgaggtgtggagaagcccccgcacctggcagccctaattctggcccggggaggcagcaaaggcatccccctgaagaacattaagcacctgccgggggtcccgctcattggctgggtcctgcgtgcggccctggattcaggggccttccagaggtgcgcatgtgcgagagtgggcggcgcggcctgggcgggggtcgggagagggagtcgggctgctggaggggctggggcctccggggccccgctcttggaagggggccatctctcatgccagggatgtgcaagatccggggtgcctggggccgggctgagagcccaggaggaagggctccagctccttccttgttccgtagctgccaatggtcataacctgggacagttcctgtctccgcccttgagaatcatccgtaaaaggggagattacacctccccaaccgtcccctcctcccgggttgaccttacggggaaaagtaaaggaggccaccccggtgcaacatctgtgataatatgtgaacttctttggataggggccatcgaagctcccctgttgctcagcctctgataactgcttggtgctgctcgattagggaggcatcaggttcatgaatggagttgagtgtcggggtgtcagagctgaatttcaagctcagcttggagatcttttcctaacctttgaaaaatactccagctatcttcctgtgagtcagcacaatctagaaaactccctacatttataaatacgtgagactcagtgggaaggtgtacaactgactgttttatgatatattaatacttacaaatcatttaatcatacctttggaacctcgcctgccctatggacagttttaattatgcgtaatttagatacattgccaaattggtcaggagttacaagctgatgttattcataaaagaagggagatcgaattctgtgccaagaatgaatttacacatatagcttcaacctaactacatttgaatgtgttgttattgtggaaattaatttatgttaaccttttgatgtttcgatttttaaagagatgactgtttttgaagtcatctctttttctttttgaacctatatttgcttacccatattaatatatgggtaaatgattttcatttaaccagtcttgttcaaaaacgggagatgccaaaaaagtataaatatactaattttcttaatgtttcaacccaaaagaagtcctggatggaccaaggcaaataggagccaccactcagaagataacactagtgcaataggaagtgtgcgaaggagagatagggaaggacctggggattttgttcaattcagtagctatttactgagccctaatttctgctatacatgtccaagggaataccaagatgattgggacacagtttttgtccttgtgaagctcacaaactttgggatatttttacattcttagaaagggtacaaactaaaaaggactgagagaagtaggtgcatccagactgcagtaatatagtgaaatatcatttttgtgaaatgaactagagatcaaaatcatattcacagtaaatggagaacaaaactgttaataccatttacaactcttaggttgtatatatcaggaaaccctgttcaaactggcataacaaaagagggaaaggcttattaaggtacagtcagattcaaggacaaaaaaatgattcattcattcagcatacttactgcctacctactatgtaacaggcactgttgtatgtaccgaaccacgtgtagtagcagtagagacagcccttagtctcatagagcttacgttataataaggaaagacatgcagtatacaagaacattaatgtgtgttgtatcacgttatgataaatatttttaagaaaaagtaaagcaggataagaggatggtgcactttgttgccagaatcctcaatttcttagctctggatagaccctttatggtttcaaggtggttgtactgagaactgcagaactctcagggtacctaatgacttgctccaaacctctgctccaagagacttgaccaagccctagcatggcttctagcagcttaaggccatgtccctaggatgatctcaggttcccttaaaatggcttcctgaagaggctcaaaagctgccagaatttcctgattgttccaggaaaaacctggtgagaggcccctgaaccctcttttagagcaattagtttagaaagcttgcaattataaaaactttccctgccttttgagatgtaaatctaccacacaaaactgtttcctcaaggacctgggagccccagaaccctgtctcagtgaaatgcgaacattctaggaaataactcttactctccttcctagtccctctgggaagataaagggcaaagttcagtggacaccttgcttcaacttgctcagttgccttgtctcataaggatagaagattgtttctcttccagataagcgctagttaacaaatccatatggcctagtcacacggactaagccctgttagcacccctcagtgcctttcccttagcacaactcagcctttaaagtctccagcctttcgttttctggggctgtgaatgcaattcacattggactcttttccctgttgcagtagtaacagaatacaatctgtccttaacactttagtcaccgattttgtgtgtctttgatagcagtcctcatattcttacaggtttaaatgtaagtcagaaggagtgctctcctcgaagctcgaagtttcattgtgcctcattgggtaccctgctcattcttcaaccagtcactatggcaagaggaacatagtgcttgtattgctacagtatagcttcatcttccactcttgaaaccagcgatggagcccccgctgaaaaacatgacaggttcatcaagaggaaaattggagtacaattaccaaaagtgagggggaatagattctgttggtcagaacccaacaaccaaccattacagcaggcattggggattttgctatgaaatgattggaaaatatgtatatatattgaccaatgattttcccatttccacattttagcatttgtacaaaacttcttttaaaaaaagactctagtatcaaccttttctgtaccaagtagttttatttaatacttctagactagagtgtaaactcattgaccacagggataatgttttatacttcttcaagccacctatggtatctgtcactatatcaatggtggcgattagaagaaataaaattggctgggctcacacttgtaatcccagcactttaggaggccgaaggcaggcggaggccaggagttgaagaccagcctggccaacatggcgaaaccccatctctaccaaaaatacaaaaattagccagttgtggtggtgcatgcctgtaatcccagctactcaggaggctgaggcaggggaatcacctgaacccgggaggtggaggttgcagtgagccgagactggaccactgcactctagcctgggcaacagagcaagactctgtctcaaaaaaaaaaaaaaaattttttttctaaactagcaaaatgaatgtatttctaacttaacagtatcatgtaacaatgtgaatttactctgttcaagttttgtggctatgtgctatttgtcatcctttccaggcatctggagagattaggtcaaaaggtaatagaagggaccagcacttcttcctccatgaagcctttactgatcccctcagtgaaaagtaattgtgcctttgttttcccatacatagctacgtcgtttgtaccttcatttagtgcatgccctatgcagggagataagatcacagactctgaaatcaaactgtggatttgaattccagcatcaccatgtgttaactgtgcaaacttgggtaaatcgcttaacctctctgtgcctcagtctcttcatctacaaaatgtactgaagtgtgtgcctcacaggcttgtggagggaattaagtgagataatgtacgtgcagcccttagaatagtgcctggcacatagtatgtaatctgttattgacattttcctcttgtttagaaggtttttactatcttccatgcttgtaaaatgggaaactctcccattgcttgtaaaacgggaaagttgtaatgatctttaaaattatttctggtgctaacattctttgactttgaagagttagtggaaagatgtctttattctctttttcagtttcagtggccagcagactttttctgtaaagggccagatagtaaatattttaggttttgtaagccagatcgtctttgttgcaatcactcagctctactgttgtgtatgttgtgaaggtggccatgacaatacataaatgaaagagtgtggctgtattccaataaaatgttacagaaacaggctgaggagtgggcagaatttggcctggggagactcctgccatactaggtgaaaagctaagcttcttatgagcaagtaccctcttattcatcatggtatgctttatatactagatcattaaaatgtgttgacttatattcaattgacttactatgaagctgtaagaggactttggagcacccttcctgcctcctaccctctcttttgtttcttcaaaaaatgtttaccttaggagagagctgaagaaaattgcagctgtctgatttgtgtttttcagggctcgaagatacctttgagattattttgttcaaaaccacgatttgacttaattgaggcagatttctctggcctgctcagaatcaaagctaacagtacttttcaaggttgctaactttgcatactaactaggctagttagtagttaagaaaaatgctgagataattttttttcgtttagtacaaagttattgccagagttgattttgtaagagcttaattttcaacagtggttcagtgctgtgtaagtaaacctcagaacaaattgatttgtaagtgttgcctaacatacttgggaaaagtaaacatgttttagttttatgcttagggtatagacttttgattaatgaaaggcctatgctgttattatccctaaaatggcagcttctgatttaaaatagttatcacaggcaccatggttgatattcctgttggtcctgttagatgtggtgtgacttcatttgaggctaaagccattggcattagactttgacattcactctgcttgactggcctgtttgttcacttgctcattttctcttttgcatagccccatcttatgtccctaaaccaaaggaaaattatctactcagtctctttcataggttatgatcatagtattttaagtgtacatatgggatactgttttcatatttttttcacagtgtaattgcttaacataacatacaaattagacatttggacctttgaaggtctggaagcagaacttcagtctaccttctgaagattgagtgtgaggattaaatgagacagagtagatgttactttattaccattcctattttggtattttgaatagctaacatttattaaatgtttattctgtagtaaatggtttatatttaatcctctaaaccatatgaggtacccactattattacttacctccattttactgaaaattgaggcatagggagatatggatttttcccatggtcatatagctagcatgtggtggagccagaattgaacctcttccttcagaaaccatccttttaatcccttactgtttcattcattcaacagatctatattgagcacctgatatgtagcaggcactgtgaaagtactttgtaaaaagtaaagcactgaaaagagcgtagttacttaattgatccctcgcttctcttttcctaatggtttaaagagaattacaccgctatattggcctcagtctccatcagtaggccaagactttctcaagaaaataaactatgctctatatgttattacatccctagtgtccagaatcgtgcctgggacagaataagcacttagtaaatggttcataaattaaggatgaatgaacgaaagaaggaaggaaggaagaaaagcaaacctcctccaaaattctgttttttttcttgctttttaaacattacttaaagaccactgaaccctctggtattgaattttcattgcagtaaaaatcaggataatgaagtaaatggcttcagcaatttatttcaattaatgtaaattagatgccaaattaccatgtcttttgccttccctgtttattttttattgtattctaatttcatcttatcctctcgtcatctctattttaaaaatgcactaggttttcattgctactttactttgttatatacctttgactatgacatttcccaagagaacatttttttcccactatttcagatttcaagatggaggaaaatgggggctcctgcgttcgccctgcatagagtgacataagtagatatcacgggattcttgacccctagccagtggctcatcttgtttgctaggctttctttgattattttttcttactgactttatcccttgatttaaatccctctataaatattaaagggaataaacgaaataaataaatgaaatccagggatgttagaagattttctttagtttttcactttctttccactcatgataattgagcatagacaaacatgcagttcagccgagcgtggtggcttacacctgtaatcctagcattttgggaggctgaggtgggagggtcacttgaggtcaggagtttgagaccatcctggccaacatggcaaaaccccatctttactaaaaattggtcgggcgtggtgacacatgcctgtaatctaatcccagctactcaggagcctaaggcatgagaatcgcttgaacctgggaggtggaggttgcagtgagcagataatgggccactgtactccagcctgggtgacagagcaagactctgtcaaaaaaacaaacaaaacatgcagttcatctttccctcagtagatatcgaaagagtgggataaaaggaaaaatatatatgtgtatatgtatacatatacacacacacatatacacattatatatacacattatatatacacgttatatataattttgtatgtatataaaataatgtgtatatatgtttgtgtgtgtatatatatatatacacaccaaatatatatatatatatacacacacatacaccaaagactataagtcattaagatatctttgcataaatcactattaaaacatggtgggggccgggcacggtggctcacgcctgtaatcctagcactttgggaggccgagacgggcggatcacgaggtcaggagatcgagaccatcttggctaacacggtgaaaccccgtttctactaaaaatacaaaaaattagccgggcgtgttggcgggcgcctgtagtcccagctacttgggaggctgaggcaggagaatggcatgaacctgggaggcggagcttgcagtgagccgagatcgcgccactgcactccaacctgggagacacagcgagactccgtctcaaaacaaaacaaaacaaaacaaaaaaacatggcagggttttgttgttgttttttgtctttttttttgagacagggtctcgctgtgtctctcaggctggagtgcagtggcgcgatctcggctcactgcaacctctgcctcccaggttcaagcgatcctcctgtctcagcctccctagtagctgggattacaggtgtgcatcaccatgcccagctaatttttgtatgtttagtagagtccgggtttcaccgtgttggccaggctggtctccatctcgtgacctcaggtgatccacccgcctcggcttcccaaagtgttgggattacaggtgtgagactccaggcctgaccaaacattgtggctagagtagtatttacatcttctgcatttagcagtgggaatttgtgactgtccaggaaacaaaacttcaatagaaactggtacccctctccaaaacagcattttgcctactcatcattttgtaaaggctaaataggcaactgtgtaacctgctaagttaaattcttttgagctaatgaagtcatgttcttcatgtttgttgttatcaatggctataacccagctgattctacatctatatacccattgtttgttgtttaaaaaagaaagagttgtttcatctgattttttttgagcccagacttgggcatttattatcttctaagcttgaaactgtttcacctttagggtttggctaagccaagtccatttttttttttttagcaagcatattaaaatattttatacaatattttggatttggatggagaataagcaagatctttaattttctttagatttgacttctagtgcctttttaaaaacgtttattttaggttcaggggtacatcaggcttgttacagaggtaagttgcatgttgcaggggttcggtgtacagattatttcgtcattcaggtagtaagcatagtacctgataggtagttttttgatcctcaccctcctcccaccctctaccctcaagtaggccccagtgtctgttgttcctttctttatataaagcatatctaggactgcatttttattcattaatatatttatatacaaaatactttataatttcttacattttatactcctttggatctgtaacattattatcattgtgcaaaaaatattctcacattatataagctgtattttatggttacagagctccattttattgttaatgatttcttttgatttggctgttaatttcttttgatatctgaacagtgtatgggtttcgacagaccatgatgaaattgagaatgtggccaaacaatttggtgcacaagttcatcgaagaagttctgaagtttcaaaagacagctctacctcactagatgccatcatagaatttcttaattatcataatggtatgaatttgattaatagtttattcaaacctttatgtacttttctacttcctttattatcttataagacttgttttaacatttgaattccaaaccttaatattacttgcttgcaaggaactttttttttaaatatccttttcatttctcttgtctttttaagaggttgacattgtaggaaatattcaagctacttctccatgtttacatcctactgatcttcaaaaagttgcagaaatgattcgagaagaaggatatgattctgttttctctgttgtgagacgccatcagtttcgatggagtgaaattcagaaaggaggtaatctcttttcagtctttattttagctgattttattgagaatcaatttttttgtatataaatatcctttaggcatgaggagagtaaaaggggagctgtaaaagagagtatttgactcattactttagtaggtaatgacatttacaatcagctgtaaatctgttatcgagccaacacagctagaccaaattaattctttgctttactctttacaaagggacattctaatcctcttatttctgtttgccttttgaggcagatatgctgtttttctagatcaaatacttttatgtttgttctagacatgtttgatgaactccatacaagtcatatagagatagaaagcatccaccaaagtgttctgaaggatttcaagaatgacattttgaagttcttccccaaattcctaactccatatataagaagggttccctagggtttactaggcattttgcctgccatgtccagtgtgctataaatcttatccagagaattattataaacactgtgtttttccattcagtaatgtacattttagttgtttcttagggattccattttctgttgaaattttccatttttttatccattttaaaaaaaggtcatttcctctaatttaacatatttttgatagctatttgaaagtccttgattgcaaatttcaacatctagtcacttacagttctgtaatctgcttctttcttgattgtgagtcacctatttctgcctcttcatttggctcatgtttaattgtatatctggcatagacacttgagtacatattttcctccagagagggtacaccttttcttctatcaggaagataggataaggggctgatcactttgattcaattaggagttgggctgggttgaaactttaatttcatctcacctcttagtataggtgtcttattaggagatacatcttgtatgtgttactgacactcacacccataccctactcttgctaacaagactaagggatctgatgaccacaatactattatgatgtctccctgctttccagcccattcccagcttcccacccagtacactcagccaaagtcttgtaagggggaagcattaggtggggaaaaacgagctatatgtttgtggttcctacagatgacaatctgtaactcaagtccacaaggtcattgaaagcccttctagtttttgcctacctcagcagagtccctctgattatgcaaagcttgatctttcttgtaccttctcctcatactcagcagatatgaccagggagaaagcagccaccgatactaggaaagatttgtccctctcttttcttcagagtaccacttgaattatctagttggtttattacctgtctctacccctagattgtatactttttgagaatagagagagttctggtcactactctgtagccagtgcccataaagctatgttatctctagctatttaatttgtatttgctaaggttttttcctgggttatttcaaacactggggtggaattgaacaggggatgatttcgttaaacaagtaagtagaggttattcctagaagcctgtataaacacagaaatggcagcaaaaagtgaagaaagattctggagagtaaccagctattacacacacacacacacacacacacacacacacacacacacacacacacacacacacagatttgaggaaaactcagtggaaaggcaaaggaatctctacatgacagtaccaaagtcttcattgattacattatgttctattcattaatgttgacattactgagcctttattatcaggtatactcataaacataatttattattatgtttagtatatttttaactaatgctaagaatgtataatatgttacataaacattttcatcaatataaaatcttcaataatttaatggagaaatctttacttttcagcaataattgtataaaaacaagttctcaaccacattagataaataaaacttatttctgtatatgcaaacaatgagaactagattaaagggcccaaatattaatataggtattttatgacaaattcagttcttttaaagctactttaaggttgtcttgatgtcctcccaaagcataatatttgtatgaataccttaattgttccacatttcattataaaatactttagttttctagtagctattggaaagcaaagataaatcatcagaattattacagattttattcctttaaaaaagttcttttttttttttttgagacagagtctcactctgttgcccaggctggatggagtacagtggcgcaatctcggctcactgcaatctcccccccccgggttcaagcgattctcctgcctcagcctcccaagtagctgggattacaggtacccaccaccatgcccggctaaatttgtgtttttagtggagatggcgtttcactatgttggctgggctgctctcgaactcctgacctcaagtgatccgcccgccttggcctccacagtgctgggattacaggcgtgaatcaccacattcagcctaaaaaaagttctttatcaggccgggtgcagtgcctcatgcctgtaattccagcactttgggaggccgaggtgggcggatcacgaggtcaggagttcgagaccagcccggacaacatggtgaaaccccatctccactaaaaatacaaaaattagccaggtgtggtggtgcatgcctgtagtcccagctacttgggaggctgaggcaggagaatcgcttgaacccaggaggcggaggttgcagtgagccaagatcgcaccattgcactccagcctgggtgacagagcgagactctgtctcaaaaaaaaaaaaagaaaagttctttatctagataaagaaatgctctgcattctgagttcatttttattaacttttttagttactaaattaacactttctatattcagggcaacgtggacttactctaactttttgcttttagttcgtgaagtgaccgaacctctgaatttaaatccagctaaacggcctcgtcgacaagactgggatggagaattatatgaaaatggctcattttattttgctaaaagacatttgatagagatgggttacttgcaggtttgtaccttcattttgcataacccttttaagcgcttttgtaggcatactttgagttctagggaagaagtatggtacaatttctttatgataaagaaaagtatcaacctatagaggaaaggtaatagccaacaacatttgctatctgaggcatttatcctgcaggtttaccccaaagtgatctttggaatccattcagtaaatatgcaaggaattctgctacaacgataaaaaaatgaatcaagtactgggtgtctacacatgtcctggtactcatattattccactcaaaactacgtaatccatgtttgtgttatagttatattgtggctgtagggttgaataacttctattgctttaaaaagacaaataatttcatagaggtgaaaagagttacaacctgggtgtcaggaaacccggaatctttttatatatatatatatatatatttttttttttttttattatactttaagtcaactgcctcttactatgtaagcttgaatatgtatcattttatctgtcctgactctcattttcaaataacagatttaatgtctctctcattttagagcctgcaacatggttgcatcatatatttcttaacttgttaattttagttatcattattatttattatttactgtgtacttcggagtaggtgaaacactttgcatatgttatcttatgtaatctgcatagcgaatgaatgaagtggacatttctacccagttttacagaggaggaaaactgcctcactgaaatatgaagtaattgactcaaggcaaaaacagctaataaatggtactgtcaggatttggattcaggttcttatgttactcaagaaatagcggttttaaagagagagagagaaacctctccattgtgtaataaaaattctaatgggactattattctgagcaaaagagagaaaaacatttttacaaatcttctggtcaatgtgtaggcaaactatagactagctgtttagttaaatttaaatgttcagaaaaattggatttgacacacatagatactaccatttttaagcttttttctaaggaggaccatgattaacccattcctaaagtgtggagaaaaatgtttctcattaaaacaaggtttatgaagagactgacaattctgaaaaaaaaaatgaaattgaaattgtccagtaattgatcttgtcattcaaataattactatcagaagaaagaccctttctcttgctgacccttgcctagaatcaagagactgcccttgcctttgcctgcatgtgacttggatgactattagtcattttcatcagtagctcagagatctaagaaaactctgtacaacagatgctacagttatttttcctcccctgtgttgcctgttagttgcaaattagaacagaagttccaaaaaccttaatactgcttttggatgatgacaggagagacttcttgaaaaaaaggaggatatgattaagggatttccacaaaatcccttgtggtcagaaacctggaggatgtaatatttctgcttttttcaatattaaaatagaaattttcttaaatagggaacttgaactgtttagatagaatttgaaaaatgttaaggttatttcttttgtgtgagctttctccttaaaaaaaaaaaaaaaaaaaaaaaaaaagctgggcgtggtggctgaagcatgtcatcccagcactttgagaggccagcttgaggcctcaagaggatagcttgaggccaggtttccaagaccagccttggcaacatagcaagatcttatatctacaaaaaactttttaaaaatttagccggacatggtgctgtatacctgtagtaccagatccttaggaggctgaggtgggaggattgcttgagcctaagatttcaaggttataatgagctatgattgcaccattgcactccagcctgggaggcagagtgaaaccctgactcgaaaaaataaaaaagtaaaaataaatttaaaaatcatttttatgtgactgatttttactgggttattcatttttctcagtactgtagaaatgaattcattgttctgtattataataaagttttgatatatgtgaatgaatattaaaaacagtattcatgacatttatactacctttagggtggaaaaatggcatactacgaaatgcgagctgaacatagtgtggatatagatgtggatattgattggcctattgcagagcaaagagtattaaggtaaaaacaaataaacctttataacctttgtactaaatcttaataattatatttctagatactgatttctgatacttcagacatcttaggatctttgtaattactttgttcatgtgaggaagacatgtaaaatatgtgtttacatggcttcaataaagtgagaaacattatctggctagaccacactacttttacttactgtactatatgttaaaatatatatgtgaagtaaatttggagagtaatgtttgaataattgaatggagggtgacatttcatgtattggtttagccagatgagagggagtgattagtactgcacttgtactcaaaggtctattttggtttcttttagatatggctattttggcaaagagaagcttaaggaaataaaacttttggtttgcaatattgatggatgtctcaccaatggccacatttatgtatcaggagaccaaaaagaaataatatcttatgatgtaaaagatgctattgggataagtttattaaagaaaagtggtattgaggtatgtgctccctgaatatagcagtattttataatattttgattcagggtcaaagaacatgcaaggaattaagagatttaaatttttagtattaactcttaaaatatctgaaatttggccttcatacgcctagaaaattattatactatttagttttagatgagtagaattaggaatttgttaatcagcaaataatatttcttgtttattcagtaaatataaacataactacttttaaatgggagctatctaatgtttcccaaaggatcttgcagcaagaaagattccctagataataggtgtaccattttagaaaaggacgatatcctgtggatttttaaaatctagcttattcttatgaatgacatttttgattcaaaataacttaacgtttaagtgtatttttttaaatgaaagctagctaagataattataatttaccagaaatcctacatatgtattgctaagcagcacaagagagaggttatagactttcctctggataaattgaattataggagaatcttagagtagtatcagacaatatatgttgtaatttttacctgtagatagaatcctttctattgtagaaaataaaatactgtgtctcacctttattgggctatgagaaataaaatgagctttgttttaaagcatcatgattttaattcgacagtcagttttcttacttggaccttcagaaagtcaaaagatgactcgtttgtgatttggactgtctacaaggtcaattattatgaaagatttctgttttcttcactttttaatttttcccttcttcctccaatccttttttttttttttttaaggtgaggctaatctcagaaagggcctgttcaaagcagacgctgtcttctttaaaactggattgcaaaatggaagtcagtgtatcagacaagctagcagttgtagatgaatggagaaaagaaatgggcctgtgctggaaagaagtggcatatcttggttggtatctttttattcacccatagtaaaatggaccaggaattaattatttacttatttttaaagaaatgacaaagcacatcctccaaatgggtatgattgtagggaaataggaactcttttaacaaacactgctgatcaaactgttaaactgggacagtctttctggaggttagtttgataataggtatcaaatgtagaatgattattagcacaagctgtgaagtcagactgtaccactgattagccagttgtgataagatgaatgttgtttcctcatctgtaaactagagatatcgagagtacctattaccgtagggctctggaagggattaataaaataatatgagtaaagcacttagcagaatttctagtacatatgaattacactctgaatagtttttgctgctaattgaatgtacatactttttcctccaaattccaattccaggaaagaaatgagacaaatgggccaatagtgaagttaaaagaacccacttaagtgtcctgtgaaaaatagaatatccctaaaaaggattactatgcaaccattacaaacagtgctgtgacctgtatttatttgcatgatcaaatataacaatgtttttcacttggatattaagcaatacacttacttaccaggtacctatgatgatacgcagcatggaactggttgtgggaactgtaggctttctgcttgcagagcttacagtctgatgatgtcaacattttaaaattgataagttattaagatgcataataactataaatcatgtatgaaagcagtatttacaagggtaatatgagcctcaaaataagaagcacaggaaaaactttgggagcatgtgatctagagacttcaggaataacccttaaaccacacatgaagatttaatggacataaatgctgcagaatgtttgttaaagacagatccaatttttattagaagaaaattttagtggaatgtataacaaattccagctatacttattatctttctttgggatgttaagcaagcttctgtataccttagttttctacttagaatataaacacaaaccaaattttataaagccattagaaagaaaaacaaagataatataaaatgcttaacatagtgcctacagatagtaataagtgtatcacttatataggtaaaactctagaattatatgtgtcaaaatgtagtgattatctacaaatagtgataattaggatgattgtgacttttttgcttctattttttaaaaaaatatttctaccacgaatacgtattacttatatgacattaaaaaaaaaacacacacacacacactttaaaaggagaggtaagaaaatggagaagagcatttacatttttatttaaaactcacagcaggccaggcatgatggctcatgcctacaatcccaccactttgggaagcggaggcaggcagatccctggagctcaggagttttagaccagcctgtgaaacatagtgaggccccatgtctacaaaaaaaaaaataataactcactcaccaatgttttatatgggtgacataagtgtataaaaatatatttcttaaaaaaatcaatacttttataagtaaaatttagtaaatagagcttaaaggctggattatgcaaatactaactttttttattttagtgaaaacgattcaaatttcaacacatttaataataaatgagaaaatttcagtagataagcatagaacaaatgtaaaagaaactctcttcaaccaagattgtactattgtatgtggtctaaagtatagtaatagttttactcagaatggtgaattaaagatactgggagcttctgaaatgcatcctattccaaaaaaggggttaacagagagggaggaaaaggatatcgttatgtcagtatgatttagtatctatttttattctttaaaaatggtaatttttcagcaactattaataaatggcataccaatcagaaccattacagattaaaagagatttaagagattatatatatataaacaaaagaccatatgttaaccttatttcattcctgattcaaataagtcagctataaaaggacaattttgagacagctgggggtatctcaacatatactaggttattagaggatattaaggaactattactgattttgtgggtttaatgatattctgtcagataaaaaattatatttatcagagataaatattgaagagtttttggataaaatattatgtctgggaattccttcttctccctttccccaaataaactagggggcagtgcatagaaaacaatattactaagtgattttaaattctgataatttttcaatataaaattggggttctcgcatatgtttgaaattttgcttaatgaaaaatttaaataacttacttagaattcatatataaaatttctaacatttgtaatatgcatggcaggtagcaattatgctccattcttcttctctagctcataagagtttatttttgattgcttagggaaaaccctggacctcaattatactgtaaaatatttttgttccatctaatctttagtattcttatatgcagtgcccctaggtcttactgaagttgccagagttacctgttggttgctgtctgcattatttagctagaatattctttgtctctttaaatgtttgctcagtatttattttacttgataggaaatgaagtgtctgatgaagagtgcttgaagagagtgggcctaagtggcgctcctgctgatgcctgttctactgcccagaaggctgttggatacatttgcaaatgtaatggtggccgtggtgccatccgagaatttgcagagcacatttgcctactaatggaaaaggttaataattcatgccaaaaatagaaattagcgtaatattgagaaaaaaatgatacagccttcttcagccagtttgcttttatttttgattaagtaaattccatgttgtaatgttacagagagtgtgatttggtttgtgatatatatatattgtgctctacttttctctttacgcaagataattatttagagactgattacagtctttctcagatttttagtaaatgcaagtaagaacatcatcaaagttcactttgtattgtaccctgtaaaactgtgtgtttgtgtgctttcaaagatgttgggattttatttatctggggacagtgtgtatggtaagacatgcccttctattaataaaactacatttctcaaacttgatgaaaactgccttgttgctctagaagaaatttaccatgcattttctttctttcctttaaacattaaccaatcttagtgagaaacaagccactcgatgccggggtagagcatctgattgtacttcacatatgtatacgtaacagcatatggtctatgtgggggttggttccaggaccacccacatataccaaaatctgtgcatactcaagtaccacagtcaacactgttgaacccacatatacaaaaagtgggccctccatatactgcatgattcacatgtatttttgatctgcacatggttaaaaaaattcacataaaagtggaccacacaattcaaacccatgttgttcaaggatcagcagtatacacaaatacaaatatccaaataaatttatatattatgaagattatgtatttatttggaggaagcaaattatttgcagttacccctgagagataatggtaattttgcatacaggaatatcttagagatattacgggtttggttccagaccgttgcaataaagcgagtcataggaattttttggatgccaggtacataaaatgttatgtttaaagtaaactgtagtctattaagtgtgcagtagcattatgcccagataaacaatgtatataccttaattttaaaatattgcttaaaaatgctaacaattacctgagcctacagcgagtcaatctttctgctgctgaaggatgttgccttgaacagtggtggttgctgaaggttgaggtggctgtgacagttccttaaaataagacaacaatgaagtttaccacatcaattgactcatgaaagatttctctctagtgtgtgatgctgtttgatagcattttactcacaattgaacatctttcaaaattgaagtcagttctctcaagccactgctttatcagctacatttatgtaattttctaaattattggttgtcacttcgtgttcatagcatctttaccaagagtagattctatctcatgaaaccacattttttgcttatccgtaagaagcaactcctcatccattcaagtttatcatgagattgcagtgattcagttacatcttcaggctccacatctaacttcattctcttactatttataccatatctacagttacttcctccactgaaatcttgagcccctcaaagtcatccatgagggttggaatcaacttccaaactctcattaatgttgatattttgacctccttctatgaatcatgaattctgtttttttgtttgtttgtttgttttgagatggagtctcgctctgtcgcccaggctggagtgcagtgatgcaatcttggctcactgcaagctccacctcctgggttcacgccattctcctgcctcagcctcccaagtagctgggactacaggcgcccaccaccatacccggctcatttttggtattttcagtagagacggggtttcaccatgttagccaggatggtctcgatctcctgacctcgtgatccacccgccttggcctcccagaatcatgaatgttcttaatggcatctagaatagtgaatactttccagaaagttttcgatttacctatttccaacagagcaatcactattgatggcagcaatacccctagaactgtattttttaaataacaagacttgaaagttgaaattatgcattgatccatggcttcagaatggatgttgtattagcaggcatgaaaaacaacatgaatctgctagtacatctccatcagaacacgtgggtgaccaggtgcattgttcataagcagtaacattttgaaggaatctctttttctgagcagtaggtttcaacagttggcttaaaatatccggtaaaccatgttataaacagttgtgctatcacccaggcttttctgtttcatttatactgcacaggcgtggtagatttagcattattcttaagggtcctagggtttttagaatggtattgaggatcagcttcaatgtaaaatcatggctgctttaacgttctaacaaaaggatcagcctgtcctttgaagatttgaagccagacattgacttttttctagctatgaaaatcctagatggcatcttccaacagaaggctgtttggtcaacactgaaaatctgttgttgagtgtagccaccttcgtcaatcatcttagctagatcttctgggtaacatgctgcagcttgtacaacagcacttgctgcttttcaccttgcatttttatgtaatggagatgcttcattccttaaacctcatgaaccaacatctgctagctacctgcttttctcctgcagcttctccatctctctcagccttcatagaattgaagtgagttagggccttgctctggattaggctttggcttaaggtagtcttgtggcctgtttgatcttctttccagaccacttgaactgtcttcatctcagaaagaaggctgtttgactttcttattatttgtgtgttcacttaagtagcactttgagtttccttctataactttttctttgtatttaaaactttgctgaccatttggcacaagaggcccagctttcggcctattttggcttttgacatgctttcctcactaagcttaattattgctagcttttgatttacagtgagtgatgtgtgactcttcctttcacttgagtacttaggggccattgtaagcttattaattgacctaatttcaatattgttgtgtctcggggaatagggaggcccaagaagaggaagaaagatgagggagcagctggttggtggagcagtcagaacacacacaatatttatggattaagttttctgtctctatgagcatagttcacaacccccaaaacaattacaacagtaacatgaaagatcacggattcacagaccatcataacagatataataataatgaaaaagtttgaactattgtgagaattactaaattgtgacacaaagacatgaagtcagtaaatgctgttggacaaattgtgccaatagacttgcttgatgcaaagttgccacaaaccttcaatttctaataaacagtatctgtgaagtacaataaagcaaagctcaataaaacatggtatgcctgtattatatatggttattgtcacaactttacagctgacataaatcactcttctacctgattagattctaacagtggagcattatctcataaatgtggatatttacctgataaaaatcatttttggtggaacatttacatctatttccaccataaaaataattcatgtaaaactctgacaagaagttgaccttccaggtcaactatacaggaagctgctttcctctgtcaggactgttggatttgcgtactccagagtatgcccctgtagaacagacataagttggagaaaaaaaaaaaaccaccaatttattttaaaaactttaaattaatggtttattttaaattaaaccattaaacaaaaattaatggtttatttattttaaagctattaaaataaattaatggcttattaattttctttacatcttgtcctagttttactctcatccttccggttttcctgctattaagtttattttttcccactcctttgcatttacacatccacaaaggttctaaccccacttcttgttctttcccaggtatcacatctctattcaaggtttcagcgacaatctccatgcagacgaaactcaaatataatcttcaaccccaatactctgttgtgagttctagtcacatctcaaattcttcatattataggccaggctcctggacttcatccctcaagttgctgattttatcattattaaaatcttacagcttttcagtttctcctttttatctctattcagataccaaagcttgagtttgatactactaacccagtgtcctttcaatttattcagtactgtcaccagattacttgttcagatttttgctagttgttaacctttttgaaatcttttagtgactccatgctgatgaccacagaataaaacatacttcaaacgaaacactgtagcctggtcacaacctaatatttccagccgtcgttcctacaagttattgtgggcctcttcaccccagtcatagcttattctcaagtcctacctttatcagcatgaacaattcattcctcaaaaaacttctgctaaaatacctccaaaatcaatttctctgtatgagtataaaccatattggagtccttgtttcgtttcaatgactccaagccaagtacaaggagataattcagttctcactgttacaactacttcctgtgttcctagcagtaggaaatcttactcaagaaaatatcacatgttcagctccaatatgtaaggaacttagaagttgccattcccatccttacatccagaaaaactggacaaactggattttgtcccatccttacatccagaaaaactggattttggtaggtccaaaaatcaatggcttttggacctaccagagaaccaaggactcagggcaaacagccacccatctggagagatatgcacatccagtgagatacaagagcatctgatacttgcttacttttgccacacatccagcagaagctcctggatgccctaagctgataggaacacttaactagtaattttcatgaattgctagaccctgagtatggtctaatgtgagagtgagaaactcctcatggttgctgtcatgcagggggcaggcgtggaaatactggaaatattggtatttccagaaataccagtgggttctcacagggaggttctgaggattcaagaataatcttccaatggccctggtaggaggaggtaaagaatagtcattgttaaatcctgccagccccttctccctcacaaagaacttgtctccagtagaaaggacttctccccagagggcaatactgaaaactcacctagctaggagaactctgaactctgctcaactccagcccactttcccgtctcacctaagggacaaaaaaatccatagtcagcaggggagaaggcggcaaggaagttgattgagaatgccacagccagggaaaatggggagcaatgggaaaaaaaaactatacccctggaggagaaattgaaacacttgcgaaggtcatctcccaagacacaagcccactaaaagaccaagacacagatgattttagagtgctccctctgttccacaccatacactacaccaataagtctccaatgtaataaaagtggatttcagccaaaaaagctacaagacacagattttctctaaggaaaaaaatacaaaaggaagtcttaaagccaaaaacaaggacactgaaagaatttgcaatctctggtatctatagctataagaaagattaaatcgcattttaactccaagcaagattaatataatttttcacactaaagacttctcttggtacctattaccataggcaatatatctggttttcaacaacaataacaacagaaattgtaagatatatcaaaaacaagaaaaagcagggtctgaagagacaaaacagtcatcaggttcagactcagatatgacacagattctggtactatcaggcaggcaatttaaaatgccatggtaaccaaaacacaggttcggccacttgccacgtgcagagtccaattaaaaaagcaagttctggtataaagaaagtgactttttactccaaaacttgcttaggggaagaagtataggctcttgcctttaagagtactgctttgcttttggagcagaaagcaagtgcttttaaagggggcctggcatgctagcatgaatggcatccagaggagaaggagcaggtgtgtattagtttcagcggcttattgacccctgggcagtttagcaggtgactgctggccccttcatgggaagatctaggtagtaaaagcttttgaaaattctccaggtgagagagagttttgcagcaggcacactttggattgtagatggactgtttttcgaggcagcctcctggtggagagttctgctctcgagcttctgagcacatagttaaatgaacgtgccctgtagggagtatctgatgaagtggttgtaaagactatacttccatttctaaagagctaactagagaaatggggaaatggaagaaagagaagagagtgagaaaataaactatctcttagaaaaatgggagtatagctgggcgtggtggctcacgctcgtaatcccagcactttgggaggccaaggtgggcggatcatgaggtcaggagttccagaccagcctgaccaacacagtgaaaccccatctctactaaaaatatagaaattagctgggcgtggtggtgggcgcttgtaatcccagctacttgggaggctgaggcaggacaatcacttgaacccgggaggcagaagttgcagtgagccgagatcgtgccattgcactccagcctgggcgacagagctaggctccatctcaaaaaaaaaaaaaaaaaaaaaaaagaaaagaaaaaagaaaagaaaaatgggagtattgggttacgattccccactgccaagttccatttcatttctatgggatttaggtgccatattcattctggctgcttcctgctgaaaggggcatagtcattgtgtatcagaatggaactgatctatttggaactggaaatattcatgagtacccggatttacagatgatattggttggaacattatagtgtgaggtctggaaagtatatgaaaaatcctgtcttgcatttccctacacagggtgcaacagtagtaaaatccaaagcagagaagtatgcctattcttgcagccggggctaaactgataagtagcttccaccaccaggacaatcctgacctgaaactgaatgctaaccattgatctagcaatatgtggggttagaaatagctttgatttgttggtttgtgtcttgcaggctatcaagacatttcctgtattatcttggatctttaggtagcatttagtcttaattgtcatgcagattccccactgccaattataaccagatatgttaacaggttggttaaatatgtgttcaacggattataggaagagctgtgaatattcacgaaagtcatcataaatcctgtctagtttctgagaatgaatcagtttagttagctagctgtgtctcatctaggaggtggcattgcagatgggttagtcctctgtatgtgatgaaggcaaatatatttttaataagaggcatttctatagaaacagaagaaaaacaaaggttaatgttgggcacaatttatctagatgttagactcaaagcatctttagttacagaggagggcggtagcaggctgacatatttttctctcctgtattacgaggaataaggtagtagtgatttcaccaagtccaaatcagaaaaatgaaaggccaggcacagtcttacacctgtaatcccagcaatttgggaggctgaggcaggtggatcacttgaggtcaggagttcaagaccagcctggccaacatggtgaaactctgtctctactaaaaatacaaaagttagctaggtacgttggtgctcacctgttgtcccagctactcaggaggttgaggtaggagaattgcttgaacctgggaggtagagtttgcagtgagccaagatcacgccaaagatcactttgttactccagcctgggtaacaaagtgagagtttgtcttaaaaaaaaaatggaaaaggaatttgaaagcattcgtttagggacctgtaacccagaaagaattcaggatttagtccaaattgcagaaaataataaaaactctaaaacaaaggacaaaactagaatcaaacaacaggtgtactatagttttttctgaaatataattttttctctctccagttcctgttatactaaagacaaatcataataggacaaatttatttgcaaaataagttttagtcttattatacttggcctgattatttgcagaaagtgcagcaagaataattatttgtcatattggctccttttaaaactggctttgctgaaatttttacttataagaaatcttaaattgaccttttaaaaccttgagcacagccacagactcatctgtacttgcaaatacttgtatgaattgggtgaattcctcttcttgaggtctcaagataatttggggctcttgggcgtgtcacaaagtgacattcttacttactacaggtcaggaaatcctgtgcagggactgcatggacaaggtatgaggccagtttttttccaagaggctttaattggctgtataagtcaactttgattccttaaagcagtctatttatacctggaagtatgccctttcagtcaaagccttggtaaaataactggtgtctccaatggtgtcctttcacagaagaaaacagattcttcttgaacatatgcagataactatactgccataaattaagtatacttacaaatagttttcaaattctggagaaatcaggtaaaaacaaagaaaaattctccgaattttgctcagaggactgtactttactcaactattaaaagctgtaaatagctcaaaaggaaaaaggatttttggactctgaaaaatcaaagaattagcagtgtttcaaacaaagtgtcataaagattatttcagtcttccattagttcagtctatgtaacttattcctgttctgtttgatatgcataaatgcattagctttttatgggagttttggaagtttttttttctttattctaatgtcaaaatctccagttattagaaacctgccttcaagagcacctgtcagtgtcctatagctggttataaaaccacctttgaaaagaatcagagtaaaataacaattatggatgacaaaactctcagaatagccacaaagacacaatcaacaaggaaacctggctatgtggcacatagtaatttagcataacaatcataattattactgataacatatgttaagacatatcagaattacaggaatcttatacaattttggaacacatgctcaaaacatgtttatatgactataactcaaagaactgtaaacaccattttatatttgacaatgtttcctgtatggtttttatataccaaataagccaaatatgtctcttttagactttaagggacctgatatctgaaaaggttaaacaggttaaaaaaaaaaaaaagaacttaatttagaatttgacttttgaaagtttatcaaatatcaaaggtttaaacacttggtattacaaaataaaatctcatgtcactataagtaaaagggaaaaatctttacttattgatagaggatagacagcttttcaaataaaacccaataaagacagtatgaggccaactgaatctgtctcttctttcctttcttttttctgtcatttattcaaaaggcaaacaaaatattttttattactttttaatattacacaaaaatttattcaaaagagaaagccaaatttcacctttgcattagtgtactattaatgttaaacccaattttcaataaaaccttataaacaaatctatccaatcttaattaatttgaccataaggtaaaattttcataaattttttataatcctttacaatgttgtgttaaagagcagatcaactttctaagaaagccttattattcagacacatgggcccagattctggtcctgcatcagtgtgcttttattttaatgtttgatttatggaaaaactaaataatccctttcaaattttagccagctttctcacacttgtagaacttcttttccaagattaatctctcacaaatctttcacaatttgtttaaattttcagttttgttctatcgttcttttagcttaggccaatccttaaaaacctcggaattagacaaaattacattccctttagcaaaaaccatatcatacttatatgccttcttataaccttttaccaaaaccacattctactttccttgtatatcttgcgtatgaaactgtttctccagtagtctcaattaacatgttacaatgttaactctcagcaactttt

SEQ ID NO: 555 - DNA, 1758 bp, Homo sapiens
gcgcgccagctgccaggcggggatcgggcggcgccgagctgaggtggtgagggactagctcccggatgtggagaagctggggagaaggcgtgggaggaagatggactcggtggagaagggggccgccacctccgtctccaacccgcgggggcgaccgtcccggggccggccgccgaagctgcagcgcaactctcgcggcggccagggccgaggtgtggagaagcccccgcacctggcagccctaattctggcccggggaggcagcaaaggcatccccctgaagaacattaagcacctgccgggggtcccgctcattggctgggtcctgcgtgcggccctggattcaggggccttccagagtgtatgggtttcgacagaccatgatgaaattgagaatgtggccaaacaatttggtgcacaagttcatcgaagaagttctgaagtttcaaaagacagctctacctcactagatgccatcatagaatttcttaattatcataatgaggttgacattgtaggaaatattcaagctacttctccatgtttacatcctactgatcttcaaaaagttgcagaaatgattcgagaagaaggatatgattctgttttctctgttgtgagacgccatcagtttcgatggagtgaaattcagaaaggagttcgtgaagtgaccgaacctctgaatttaaatccagctaaacggcctcgtcgacaagactgggatggagaattatatgaaaatggctcattttattttgctaaaagacatttgatagagatgggttacttgcagggtggaaaaatggcatactacgaaatgcgagctgaacatagtgtggatatagatgtggatattgattggcctattgcagagcaaagagtattaagatatggctattttggcaaagagaagcttaaggaaataaaacttttggtttgcaatattgatggatgtctcaccaatggccacatttatgtatcaggagaccaaaaagaaataatatcttatgatgtaaaagatgctattgggataagtttattaaagaaaagtggtattgaggtgaggctaatctcagaaagggcctgttcaaagcagacgctgtcttctttaaaactggattgcaaaatggaagtcagtgtatcagacaagctagcagttgtagatgaatggagaaaagaaatgggcctgtgctggaaagaagtggcatatcttggaaatgaagtgtctgatgaagagtgcttgaagagagtgggcctaagtggcgctcctgctgatgcctgttctactgcccagaaggctgttggatacatttgcaaatgtaatggtggccgtggtgccatccgagaatttgcagagcacatttgcctactaatggaaaaggttaataattcatgccaaaaatagaaattagcgtaatattgagaaaaaaatgatacagccttcttcagccagtttgcttttatttttgattaagtaaattccatgttgtaatgttacagagagtgtgatttggtttgtgatatatatatattgtgctctacttttctctttacgcaagataattatttagagactgattacagtctttctcagatttttagtaaatgcaagtaagaacatcatcaaagttcactttgtattgtaccctgtaaaactgtgtgtttgtgtgctttcaaagatgttgggattttatttatctggggacagtgtgtatggtaagacatgcccttctattaataaaactacatttctcaaac

SEQ ID NO: 556 - protein, 430 aa, Homo sapiens
MDSVEKGAATSVSNPRGRPSRGRPPKLQRNSRGGQGRGVEKPPHLAALILRGSKGIPLKNIKHLPGVPLIGWVLRAALDSGAFQSVWVSTDHDEIENVAKQFGAQVHRRSSEVSKDSSTSLDAIIEFLNYHNEVDIVGNIQATSPCLHPTDLQKVAEMIREEGYDSVFSVVRRHQFRWSEIQKGVREVTEPLNLNPAKRPRRQDWDGELYENGSFYFAKRHLIEMGYLQGGKMAYYEMRAEHSVDIDVDIDWPIAEQRVLRYGYFGKEKLKEIKLLVCNIDGCLTNGHIYVSGDQKEIISYDVKDAIGISLLKKSGIEVRLISACSKQTLSSLKLDCKMEVSVSDKLAVVDEWRKEMGLCWKEVAYLGNEVSDEECLKRVGLSGAPADACSTAQKAVGYICKCNGGRGAIREFAEHICLLMEKVNNSCQK

SEQ ID NO: 557 - DNA, 63761 bp, Mus musculus
  misc_feature (1)...(63761): n = A,T,C or G
ctccaaggggaaaaccaccttgctgaagcactgggctccgagcgagttagcacacagcaaagagaaggacgtgtgtcctccagacaggactttgggctgctaggaagaatctggaaaaggaatggccaaggctgggatttcgagctggcttcaccttctcgagggggaactgtggatcacatgaaggtgtgaaagatgagggaggcgttatggatacacaacagagatttggttgagcctagaggagcaggggagagaaactgtcttccatcagcgctctcacacaccgctggctggcggggtgtaggatcgaatggcgggattagaatgctgtctgccagtgtctgttagcattaaccttgcttgagtccactaccgcactgacccacttccagggctgtttccaagatggacacgtacccaagttcaccaaaggcgtctttgagacggtctgtagcagctcccagcaatctaaagaacaacccacgtgcccacctgcagcagggtgcgtgcgtgagtccaccctggtgtgtccataccatgtgacatcacacagccgaggaaccaaacgctgctgcatacacactatgggggtggatcccacatgcacatggaacaagaggaacaagctgagcacaccatgttcgtgacattctaaagcggcctggaaaggaatcagggtgagaaaagtcttcacatctcgggagcgggagactgacagggaacaagaaggtgcccgccgctgtgtgggatgtggttcggggaataaatgcactgagctgtacacttagtacctgtgcatttaccagatgtaagttgtgtttctgggcagagtcaaaataggaagcaagacaggctcccaaagaataaaagttatgaaaagcaggggccagccagaaaggctgggagccgagttctggaggaggggtaacctgtgtgacggtccagcatcaggagaacacaatgcactcctgacttgttgatgacaccaccattgcttggctgcctcttcttcttcacctcctcctccccctcgttctgttctgttttgtttgtttgttttgttttgttttgttttattgttatggttttttttttttttgagacaaggtttctctgtgtagccctggctgtcctggaactcactctgtagaccaggctggcctcaaactcagaaatccacctgcctctgcctcccaagtgctgggattaaaggcgtgtgctaccaccgcccggctcatcccttttttctctgtgcctcttcttactcatttgaaggtcgccgaaaacacaactcattcctttaccctttaatgatattatgggaggggctgttgagatggcttagccaggaaaggagcctgccactaagtcctgagtttcactactgggacctacatcgcggaaggagagaattgacacctacagttgtcctctgactgccacatgcatgcagcggcgcatgaactcgcacttgctgcccctatttgtgctacataaaaaatgtagaaaagaaaaggaaggtgctatgggaacggacgaagtcggaggaggaggggctggatgggactccattcaaagctgagctgttctgtgcactgtgtccttggctaagtccattcctcctgtgggtcttacttttccatctgtaggaactgtctttaataggtgatgttttcgtgagaaataggggtggggaaaggaaacatgatgcctgtcctgtttggggagctagtgagcgtacccatgtgtgaatgagcattcatggcataaacaaggtcatgttaaggacatcaatgctccagacccacaggaatggcaaggtcttgccctggttcacagttgagcttagatactgttattgaccacctcctcctcaggaatgactgcatcccgaggatgctctctacagagacccccgctgacaatagctaacagctctctaccctttctgccatctgtctataataagcacgctgagtttcagatgctgtaactccatctgagcccaccacccaccagatcctagctttcctgtctgtgtgtctgtgtgtctgtgggtctgcagtttctccattccccatcatctgaatgaggtcagtcctgtgggagtcagggacagacgctgatggcagggccctcaagtcctatgaacctccatggagtgatccaagatggcctgctgtgggccaggcagagagttcaccactgcccatgaacaaggtaagaagaatgctggcacaggacaattagcacatcacagcaaccctgtaagttgtcatcaccgcactttacagaagggaaaactgagccatacggatgttggataacttaaccaagatcactgttaatcatctgcggtgcctgttcccaaccatactgacagtagcacccaagttagcatcttccattgggaaggtgcctgaagccaccgggggtgggggctccctcaagactgctgaccaagatcaaccccggcagggcagccagcagcgccctgactttagtgagatccacacccttttctaggaaggtgaactcactcagaataattatggagtgaacagacagccgaagccgtgtgtagcctggaggtcccaggaaagatgaggttcatgcaacgtgccgctgagcccagaagagctcagctcaccctttctgccaagattttttttttttggttgctcttgtcattattgtttcttggagggagggagggagggagggagggacacccacacccttcccaagctccttgctttggacatgnnnnnnnnnnnnnnnnnnnnnnnnnnnnnnnnnnnnnnnnnnnnnnnnnnnnnnnnnnnnnnnnnnnnnnnnnnnnnnnnnnnnnnnnnnnnnnnnnnnnnnnnnnnnnnnnnnnnnnnnnnnnnnnnnnnnnnnnnnnnnnnnnnnnnnnnnnnnnnnnnnnnnnnnnnnnnnnnnnnnnnnnnnnnnnnnnnnnnnnnnnnnnnnnnnnnnnnnnnnnnnnnnnnnnnnnnnnnnnnnnnnnnnnnnnnnnnnnnnnnnnnnnnnnnnnnnnnnnnnnnnnnnnnnnnnnnnnnnnnnnnnnnnnnnnnnnnnnnnnnnnnnnnnnnnnnnnnnnnnnnnnnnnnnnnnnnnnnnnnnnnnnnnnnnnnnnnnnnnnnnnnnnnnnnnnnnnnnnnnnnnnnnnnnnnnnnnnnnnnnnnnnnnnnnnnnnnnnnnnnnnnnnnnnnnnnnnnnnnnnnnnnnnnnnnnnnnnnnnnnngcaaactagaaaagctgtgggtcccctgcctggtgggctgttaggcacaaagagcgggagacacgtggctcattacccgtcatcccagctctgtagttcatagacattggtatggctgtgttggagcccttcaatctcaaatactatttctgtggtcttcttcagatcgggtctctactgagcaatctcctccttcacactcaggaccacccactttggcaccctcctcagcttccgctctaggactgtgtccaagcaggagttcatccaaggtcatgggatgtctgagctcctctgggtttaggacagagctgtccctgcccaggagggcttcagatcccattagggcaacttggcgggacagagcttttttggaaaagcgtgtatggcgctaatttgggggtgtggcgccttaaccccttctgtgccaggggcttctcagacatctggtgaataccatagcccatgcttagaatcatttatgggactgcagcatgagggctgcccatgatggtgcatgtctctaattccagcatttcagatgcagaacagaacgatctctgggagttcaaggctagcctggtctatatctagagttccaggacagctaggtctacatagaaagaccctgctgtgtcaacaaacaaaaggatgcattttgatgtagctgttgggagagtgcttgcctagcctgcacaggacattgactcataagcaatgcctgatatcctatgcctgtaatctcagcatttgggagatgaggctggaagatcacaagttcaaggctagcctgggctacatgataccctgtcttgaaaatgaacaaacaaaaagtatatcttttttttttttgcattcagacaaaattcatgcaacgaaagcagtttaaaatgcaagtcatcaaagtattcaaaaagcaagtttgcagcatcatgatacatacatttccttattagcacattaaataatggggcttgggagatgggttcccgtgggtaaagcccttgatgctgagcccttgaatgaggtccctgagtttcagatccccaggacccatataagactgaattccgtggcaagcatnnnnnnnnnnnnnnnnnnnncttctcattcctttccctttgtccttttctcttggagacagtgtcttgtgtagctcagtggtctcgaacttaccatgcagttgaagatgaccttgaacatcccagcctcctgcctatgcttctggggatcacaagcttgcaccactacacccagtttattctgtgctagggattgagccaagggctttgtgtaccagacgggcactccctacagcaaactccccagacttctgctgtgctttctgctaacactagcagctaatgaatgtgacagtgatgtaataaaaccttgatggtgtctctcactcccacagtcaacctctcagggcagcagagatcttttaagtactctctttcccccaacacccactaccagcattcctccaccaaacttttgttgtcctggtaagagctagctcccttcatgctctgtcccagcatcttatgtggtctgttgggttcaccaccaccacagatacatcttatcaggtcccttggtgaaggtttggtggcatgttagaaaccacacatggatgaaggtcagaggtcaacttccaagagtcaggcctctccttcaatggtgttgatcctggggatcgaacttggattattagactggctgcaagcaccttttccagctagggctatatctctagccccctaggcattgattttttttttttaaattttcaacttagtttccattctctgaggttcatggacctattgtagtttcttgctgtgtgttcggtttgatttgttgccttaatgttttaaacgggtggtaacttgagaaaacgtgctgcccttcggtgaacattttgctgggaagtaagagagatgtgcagaaggtggtgtccaatgcccaggggctggactggccttgggaaagggcggactctacttatggcaaaaaagaaagagggcagtatatggtcacacagggtgggatggggaggtagtaaatgtgagctgtctcttccagatacttttgtttctccagagaatagaagggatggcttttgttggggtaaaggagaaggaaagggctgtgacttgtgagagattggtggtgtttcctggtcactttggaatgtagagggcttgggaatctagtggtcttgcctgcctgcagnnnnnnnnnnnnnnnnnnnncacccaagttagcatcttccattgggaaggtgactgaagccactgggggtggggtgggggtgggggctcccctcaatactgctgaccaagatcaaccccggcagggcagccagcagcgccctgactttagtgagatccacacccttttctaggaaggtgaactcactcagaataattgtggagtgaacagacagccgaagctgtgtgtagcctggaggtcccaggaaagatgaggttcatgcaacgtgccgctgagcccagatgagctcagctcaccctttctgccaagatttttttttttttggttgctctcttgtcgttattgtttcttgaagggagggagggagggaggaagagcagtggggacacctcaagaacagaacctgtgcaagtcaggggtatgttttcatctggcaccgtgaggactcatggccactccctccccttggtgccatgatggtttgttgcactctttcatgccactggagaagaacattctaatcatagaatgttctagaaatcgaagcctggagggatgagaggcagtaggctgaatttagccaccagagggggtgctgggtagagatgtaggagctgcttcccagtgcatgatgggctttccccgtttgcttaagccaagcaaccccaacccaagtgcagaatgacggtaacacaggcagccatccctgtcaggatgaccaggaactgtggcttcggaagcatctagctctatatggactgcagcgtggggcagttgatctcgggtttgggcactgaatgtcttcatcaggaaaacccccacattctaggcaaactagaaagctgtgggtcccctgcctggtgggctgttaggcacaaagagcgggagacatgtggctcattacccgtcatcccagctctgtagtttgtagacattgggatggccgtgttggagcccttcaatctcaaatactatttctttctttcttttttttttttgatttatttatttattatatgtaagtacactgtagctgtcttcagacactccagaagagggcatcagatttcgttatggatgggtgtgagccaccatgtgattgctgggatttgaacttgggaccttcggaacagcagtcggtgctcttaaccactgagccatctcaccagccctcaaatactatttctgtggtcttcttcagatccagtctctactgagcaatctcctccttcacactcaggaccaccccttcggcaccctcctcagcttctgctctaggactgtccaagcaggagtccagggtcatgggatgtccctgcccaggagggcttcagatcccattagggcaacttggcagggcagagcttttctggaaaagcctgtacagagctaatttgggggtgtggctccttaaccccttctgtgccaggggcttctcagacatctggtgaataccatagcccatgcttagaatgatttatgggactgcagcatgagggctgcccatgatggtgcatgtctctaattccagcatttcagatgcagaacagaacgatctctgggagttcaaggctagcctggtctatatctagagttccaggacagctaggtctacatagaaagaccctgctgtgtcaacaaacaaacaaaaggatgcattttgatgtagctgttgggagagtgcttgcctagcctgcacaggacattgactcataagcaatgcctgagatcctatgcttgtaatctcagcatttgggagatgaggctggaagatcacaagttcaaggctagcctgggctacatgataccctgtcttgaaaatgaacaaacaaaaagtatatctttttttttgcattcagacaaaattcatgcaacgaaaacagtttaaaatgcaagtcatcaaagtattcaaaaagcaagtttgcagcatcatgatacatacatttccttattagcacattaaataatggggcttgggagatggttccgtgggtaaagcccttgatgctgagcccttgatgaggtcctgagttcagatccccaggacccatataagactgaattccgtggcaagcatctgtagttcaagtgttcctataacaagataggaggagacaggagaattgccagaacctccagggccagcttgcctggcatacagagtatctaacaagaggtcctgcctcaagtaaggtggaaggtgaggactgaggttatggcatgtgtgtgcttgcacagcacacacagacacacacacacacacacaagcaagcacttagaaaaaaagactaagggctgagagtacggcttaagtagtaggggacttgcttagcaattgagatatcctgagttccattccaaacactaacatcaagcaaacagatatagcagtaagccctatatgactttctgaatgttgatagcttaggtctcaggagagttacagcaactctcgtgatatgggaatatctaggggtgacagaatcgcaaagacttctttcagaatcaaaggacatattgatgagcattcaaagaccagcgaccataagggtggaaagtgggtctaccccagtgtctcagccctctcagaattctattctcagtccaggcaggatcccaagagccacaactttaaggcaaagggttcttggttctttagggtggataatgacagcatcaaagactccgtgatctaaaagttaagagagtgaccaggtaggcttgggttccggggagaaagatcaccagaagggaatgccggagcgcagagctaagtccatttggcagggagcgagggaaggcaacaagaccaaacctgaaacacagcagtaacctcacaacacagcaccaccccagagcaccacactctttctcgtctgtcacaaagagcaccaaggctttgtcctgtgagacagggtacctgcctgcaagcttacgcacaagcagacaagacggacacataagctagtaacaagacaatggcggtgagaggggaaaaaaagatgtggccggaagaatctaaaacataccacatatctggttaagagctgacggtgtaagccacaggcattcaaggtggggtccttcccttaggaagtttgtggtgaggaccaaaggccagcagctcggaaggctgggtagagtgtgttttgaggtggtggtaaagctcaggtctcagcgaccttctctgtaaaatgaggataatacttaaataggtgcctgctgtgagctaatgcttgcagtgggtacaggagacacttggagatcgcagggaatactggtttttagggtggtaggtgtgaaggatagatggctgaaaggacggaagatggatgggtccaaataagtgtcctccaaataggtggtactccatattgcagcaaggcattcgggagaattgatggatagacagaccctctgctctcagggctcagctacagcgccgactgtgacaatgtggtgataggtgacaggagatggttagtcagggttgtgaggacaagcatgttgggaggctcattgctttctcttccccagcttgtctcacatccccgcttctgggtttgccgtggactagcaggctcaaaggctgcgagaagccctgatcctgcctggtaggggacaggaaggcgaccaaggcctccggaggctggagtaggggagctggttttcatgcatcttcgcacactatggttgccagacctttgcaggccacagtcacccgcatgcctgagaatctggggcagggaaatttgggacacggaggaagggcaagcaggtagtcaagcccgcctggcacacttggtagtggaggtctccacaggctgtccaccttttcaagaggctgcggtgcccggctctgccgcgttcccgggtacagtttcgcattcagactgcgttagattatctgaaccccgctaggcctgcagcgccgcacgcaggcgagggttttctgggccgttgctgggcggagcttgagctgtagtcgaaaggctcctcgcagacgagtggcgcagcttgtgggtgggcggagcccaagggccgataggcgtggccggggctggagacctaggagccgagtctcagcgggtgaaatcgctgcaatgggttgaggggcgtggcctatgtccgcagagggcggtccaggctagggaggaaggccttcgcctatagagggcgggccgggaagggcagagagcagctaggcagggggtgtggtctgtgtctgcagagggcgggccctggaggcgtggtctgtgcctgcagagggcggggctcgccgcagagggggcagcgccggctgagagtcctctgcgagccgctgctgnnnnnnnnnnnnnnnnnnnnnnnnnnnnnnnnnnnnnnnnnnnnnnnnnnnnnnnnnnnnnnnnnnnnnnnnnnnnnnnnnnnnnnnnnnnnnnnnnnnnnnnnnnnnnnnnnnnnnnnnnnnnnnnnnnnnnnnnnnnnnnnnnnnnnnnnnnnnnnnnnnnnnnnnnnnnnnnnnnnnnnnnnncagtcgcggcgcaggcaccggaacccctcaccagccccacgcagaccaccgcgacctccagctcgtcccaccatctctcccgacgcagcggagccgcatctggcacctaacaccaccccggccgctctggagcccgcgcccgccctggcccggccgcgccgggagcccggccccgagctggagccgcatttggagccacgggcccggggccctgagccacgcagccggcgcatggttaactcgctgctgttcggagagatggccttggccttaggctgcccgccggggggcggcggctgcgcaggcggcggcgggggtggcggggccgggccggggccctcgcccgtaacggcggcgctgcgggacgatctgggttccaacatccacctcctcaaggggctcaacgtgcgtttccgctgcttcttggccaaggtgcacgagctggagcggcgcaaccggctcctggagaaacagctggagcagcagcagagcgagcgcgatcggcggctgcgctacaagaccttctcccgcgagcaggccgtgcagaccgggcccgagctgctgcggccgtcggctgcgggaagcgggcaggccctcggcgcggccaccggcgtcaacgccaacgcggtggccctgggcggcctgccccccggcggcggctcgcacccgcagcactacggtcgcctgcccgggaccatctggagctacacgcaggtgcggcgcacgggaggcggtggcgtggagactgtgcagggccccggcgtgtcgtgggtacacccggacggcgtaggcgtgcagatcgacaccatcacgccagagatccgcgctctctacaacgtgctggccaaggtgaagcgcgagcgtgacgagtacaaacggaggtgagtggacgcgcccctcctccgccgctctcagaaccggcagcagggcctggcatatgggctgcgaactgcgggaggactaggtcatctaaatccgcgaacgagcgcagggagcgcgggatacctgggcgccgacccctggggccaggcacattgtttcccagggacgtaataaccagcggatttgtggtgatctcattctgtccacatgacagtgcggtgtgaggcagccttgtccccatactgcagatgaggaaactgaggtgaagaggtaccaagtgtcttgctcaaggcagcttggctaatccgcggtgaaagtcaagacttgatcctttgatggaagtcatggctggtgtgtctcctagcctaggtattccccgagatgttggtggtagattccctttcccatagcaggtgtaaagaaaacagtctcaactagctcattgtcattttttttttgtccttgaatttaatgagctcacgtgtgaagatggatggctctgtccctagggccccggggtcgcctatcttgttccaggtctttaaggccaagatctctggcttgcagaatcaaaaccagacactggcctttcagaaattcatcatcttcttcatactctcccaaatctcatggtttattggctaggtcccatgaattcagcctaaggaatcacccccccccccagggaagagatactcacgggttagaataatgagtggacccagatcatggggtcccgctggaggtcaggagccgactgcctgcaagatggccagtgtattccttgcagttcagatttcctggctgcaatactgacatgctttctgcccgcagcctgcttgacagtagtgtctactcagctttctgactcgaggaggggaagggtctgtgcgtaggtctcaggtctgtgtgggggaggggcccctctaggctcaggctccaatctcagctgagtgtaattctggttttgttgtctttacttatgagggagtggggccattcctttcaatcctaaactctccctggaagctgtgcctgggccttcgctcttaccctctactgaagaccactgccccgggaagaagtcaggtgctagctcccatcaccggcaggggagattgttagccacttggaaacctttttgctcctcagggaaatctggactgtaagaagcagcagccagtgctccagggagagtgggatgaagcccgtgttggacgtcatcaagtagacgttcttacctgtgaaagcagggagtagcgatgcctggagcccccagcgctcctgcagggcctggattgctgggggaatgcttttattttattttttttcccctggctttgggaatgtcccgtgccattcctagggaggccaccctctgcccttggtggtcatccccgtcagggcggactagggaaagagacacttgctttggatggtgaaactcaaggaggaggagggttgggctggccctcctatctgccaccttgactgtgtagtcatgacccaggcttgcgccgcgtttgtttaattgtgtgtgtgctttttggccctggctactaaggtgatagaaagtctgagcctgggctttgagagggatggattgtcattgagcaatgagccgttcaggttgcacccagggtgtgggttgtgatgtcagcttctggcactgtcctggaatgagccggccctgctgagacaggtggggtgcgggcatctctctttcccgcctttctgggaggttcctggacaccttccttccttctctgaagtttcttcaaagctttggatttttccaaagccagcattctgcattgctcgggcctcggtttccccacctgtaaagcaaggtggtttggacagcagctgtgttccttgaagccccaggctttcttgatgatactttagaaaaagctccttgggtaattaatacaaaatacaacgagggcctgcaagatggctcagcaggtaaaggtgttgccgccaagcctaaggaccacagttctattcccgggacccacacggtagacggggagagtctgctcctacaactcattctctgacctccacacatttgtttgtggcatgaatgcacacacaacacacatgcacacacatacataaatgtaataaaaaacccaatacatcaatcagaatgctagtccagtcgtgaaagtgttcttgcttttatacattgatgtctgtcgatgtacctgaccccagcagcatgctaactttgaaatagttggcttctggttaaagagatggatattttaaagagattgaaaatttaagaatatgtaaagactgtgggacttttaaagttatttagatctttctaactattgcgtgctgcccgagcaggctgcttattcagttgcccgcccacccgagtgtgacaagacacttgattttctgctcatggcctcatcagttgcattcactgaacctagaacaagttaatttgtgtattcgagtccataatataaatacatacagaagggcattctgttcttactggccgctgtatggagttccccctacgagttttgttcctggaagaaaacttaaaaaaaaaaaaaaaaaaaggttaaaaggaaaatctctgggctacgtgatgtgagaggggctacggaggaggcttgtcagtaggtgacaccccatgttagagcacttacttatctagcatgcagacgggatattgggttgcaataagtaactatatctgagctgctagcctacctccggttctttgactactaagaggtcacagtttaagagatgagaccaaggtgtttagctgccaggtccctagagtaccaaaggtatggtggcttcctggagtgtctagtgtggagccttgcgttgagcactggagaggtcctggctggagagggaagggctccagggctgtatctatccagaggaccccagaggctcctgcttgcttcactaagtggtaagctggctgtatagctaggtctagaggctgcaggtgtctgtggttccgtctcatgacttgttcctagccacgttgcacctgtagttttccggtttcgctgaggtagaatcggtccatcttaaagccaccgagttttaagtatagcagtgatttttagaaaatgtagagccatgtacccatctccagggtctgcttttagaacaccccccacgcccccaaactccttcctgcctgtttgcaaacagctcccctctggagcagtccctgccggtgtctctgcccatctgatttttctgaatgactcaaaagctggatcccatgatccgaggtcttctgtccctgacttcttttacacaggccgtgttttagtgatgtgttgtgtttgtgtgtatttgtagaacatccctcctgattgctaagtcacacacacagaatgggtatgggtttgtctgtttcttcaccttacatagtcttggttccaagttttaagtgcacacaccacccagagcagagcttctggccccagcgtgcccccgccctgactctgctcaccgcttctttggtttctctttggcccaacctgctctttaccgcgtgggaagtgtggtcaccgaggctgtatggagggcaaagttgtgaagcgttgatctggaaaccaaaacaaacactgctgactgtcaccacccagtccaccaagatctcttgttctgagtttgcaagtcggggggctttcccccgggagaatcctgacaaaatatctgaactttaaatacctgccttttctgaattagtctccgagggacctggactcccttgggggatcccagggtgtgtgtcatggctgatctttttgccttttcagatggctttgtgtttattgtgctttctataggttctgggcatctccactttggatggccagagtctataccatgacgtgttcatttattggagaaggagggtgggtcactttatggtcgtcaagcaaaagttttatgcaggtcccactggctgttgtggggaagttgttgccaccattccaggaagtgacaattgctggcacaggcagcccagctgcctgccgtgcagggtaactttctagtgtcccgaggttcaaagccccgagccctgtaggccctgtgattacaggctggccgactttctacccttgctgcagatagacaggcagagtttatgtgctcctggctggcttagtccttggtatttggggcaatggagggctgtcagaacatctgagggacccttgtagtcttttatcttggtgggcccttcagatcccctgaacccatagtatggtgcctcatgggtgagtctggggacagttggaagctgagccccagatatttgatccaggccaaccacaggctctttcttccatgattctaaaggatagtctgtatagaaacaggtttgctattgataaaagaaatcaccaattcagctgtgtacattcctgtcagaggtggagaaactgaggcccggggggttggggggggagctgccatccacagctggctttgggaagcccttctaactcatcctaactctgatgcccacatctgcctccagcggggccttctcaaaggccttcttctactgctgtgctcagagtcttttaaaaaagctcgttcctaggacaggagggacttctgtcacagctatttctgactgtgagacggaaggggctgggctcctagctaaaatggagggctccaaaaggggatgttaagtgggcagctggagtgtccctgactttcccagcatgtcccagggaggccctccagcaagtgggtactggccgcttagtgctccgagctccaaagactgtctcagaagattgtccccaggcctctggcactttttacatttctgaagctcccaataatagggtcctttaataataggggttttcatttctcagtgaggcaccctaagatgatgtgaaagtgttcgaatcctgactctgccgttctgtctgatcatgggcaaatctcttggcctctctgggcctggccctctgtacagagggatgctggggaagaatagtttagttcttcagtgaaggccccacagcctgggaaggtctgaggatgctctttattgtagcccacagagtctgttcccttaatttatagggccctctgggcacagccctgggctgcccaacaaatccatttcaggacacattgcctctgtctgtgtcccatggaaggcgccagagccggtgctgggggtggagggaagcctggcctcccctttgtcctgctgaagggcagttcggccattctaggagtgatttgtgcctccggaactctcgattcccacaccagccctttgtcttaaaggaatccacacccatatcccctccttctaggacctcagttcactggagaacggggttactaagtctcttggccagctaggcatctccctgggggacagatttgggaaggcctctcagagccagagggaggggagggagggagagaggtcccagaaaagaagggaaaccaggggacagctgactctgaagattccttccttcccggaggaatgcaggcgaggctttctgccgctgctggggccccaccggatgcatgcctactcacccccacccccacccccagccgctgtgcacagccacatgtatccgtgcacaaaactcgaacatgcttgcaagcacctggtctctggcttgaatctccacacgtgtcctgtcaggtcgctgttgaaggacactgaaggggagagcagactctagcagactctcttgcatgcatcctttgctgcagctagattccgtggcttctggtggcagaactgatcgaagccccgctgggtatcagatcctggaggactgggtgggactttgtggtcccctctttgttggcattggggacatgatgccagacgggcattctgtgtagttttgtgtcacagatggctggagtcctgagacaggactacctacccttggttccccctgtgctcagtagtaaatgtgtgagcccactgagactgcacttcctcccaccctgttgcccccacactctgaaccctaacaggctgggatgtggctgctctccggtgctcggcagctccgctgctcccagcttccttcagtgttcacagtgctcagtcagaccgaccagagtccacaatgaataaatatttgtgcagtctgggaggactgcaagtctggctgctggctgctactaggtgcccaggagacagagaggtcaggtggcacaggctgggcatcttaggggtctggcttactgggaggaagggtcaacatctggagttagaaggcacagcttcagtccggatatagcaattctgtgagctggcatgatgcccaggcctagcacaatagagaaaaactgtgggagtctgggcaaggtggtaagcctctcccagtctcagtttccccatcaatagaatgggaaggctgctcattgtggtaccatgcgtctacatgtctgtcatcctggtgctagggaggctgaggcaggaggatctccatgtgtttgaggacagcatgggctatacagtgggttccaaacagccaggactacaacgtaagcttgtttagaaaagccagaatggatcagttggatcaactggggaaagctaagctcctgtatcaggatgtggcaggagccagtgggctcacatggctacagaaagggtatacacgggaggtaaagagctatgtggggagagtttgcagggtggtgtgggggatggactggctctgcgtaggctgagcactgagtgcctgcttgggaactaggcagtagtttaggggttggacatacttctgggtgcaccatcctgcgaggtttagggaaagtctgagaccaggtgggagcctcagctggtgagcatttggttagccacgtcaggggagcacctcctgtccacgtcaggggagcaccttcctgtccatgtcaggggctgatgggatgccttcctaggcagggtgtggtttcttatacagtcactggtacaagaggaactgtcacccagcataaagctagcaaaaggacccggctgagccccctcccctccatcgtgggctgcttgagcccgtggagtccagtccttgtacagatctgtctaagggtgctaggccttcccaggttggcctcctgggaggtggggatgggcttgcccatgcccgtgacttcctgtgttccttgtgactttcctggataggtctggatttgacgaggttcattgtctctcttacaccttagtctgtctgtctgtctgtctgtctgtcaacacttgggaagcagagacaagaggattgtggaaagtttaaggccagtttgggctacaaggcaaattgaataaaaatgttcatggccagcctgggattcacgatgaaactctgtctcaaaaggaagaggggctggcaagatggcttagggaggcataaaagctttctcccggtctcccgagaggttcagtaggccctccgaccctgggccttggggctctcccctgctgtgaactcactctgccacctggaggcagataaaggctgcctgaggtgaggaggcaggtgcagagtcttcctcagtgcctgccacagtattgtcctggcgggtaacagaatagaagactggcctgggaagatgtcccgctgtcattttgcagcaatggcttcttaggtggcaagtcagtcactgacagcatcaggcagctgagactttgagctgtcctacagttcccccaccccaagaggaccctcatttgggggaggtgagaggggggagctgagtgagcagggcctctcgccacaggggcccacagatgggtgtacctgctcacggctccccggacagtctcagccccaggcagcagtttagtgggaaggcacagaggctcgttggtgcacattgaaggcaggtggactgtgtatcccaggctctctgtaaatactcctaggcaactaggggacctaataatggcttgaaagcatcttaagtgttcacaacaagcaggaaggagccgggacatttgagggcaacatgaggcctggggacccacacacacaattttttgcttctgatcacattgtaaactttgctgtggcatcaagaactggtcacgggacttctcttgtctcttgctggggaccatggcagcttctgctcctggagcttatgtctggggccgacagatgtgtcatatgacactgccatgtgccaaatgcctgtcaaacaatgcccatgcctaggaacctggtaagcatgtctttagttcatttcataaacaaatatttatacagcattcacctgttaccaggccacattcagagagggtcacaggcatccaattcacggaacctcattccagccctgggggtgagctccgtcctcagcccattgtagagatgccaaaactgagccactgagggaaccgggctaggggagagttaacccagtgagtcagcccccagatctcacttgtacaccgtgctcagaggagggagcccacagcaaacagctctcctgtgccaaacctcagctttcccttttgcacaaggggtgagcagtctgacctcaggggccgtgcgtgatagccgctgcagtgatgcctgtgtgtttgaatcacttgatatgctggatcctacacggggccctctgacttcagtgccaaatcccccccgcccccccaggataccccaagctctgtgacacacctcttgctcttgtccttgcctttgccaccacgcggcccctggaccctgagagcagctgacagagctctggatggaaagctgctgaggcgggactgctcggagcagggccttggtacagcccgtctgtggagggagaatctgtgggtgcttgcagagtcttcctctcagggtctctgtttctatacctgtggctgggcatgcccactgggtggactgcgtgaggagctcagggcctgagcgccatcatcccctcggatccttagcctctggaccctcagccgagatgaacaagctggggcccggagtgtcagttaagcattgtctctgagtggctctgaccagccagagagattgtgtgctctgcacgctcactgcgtgggctctgactttaggtttgcccagcctctgcctgcccacctgtcacttggtggggaaaaggctcctgcagcgaacgcactgccttcggccttctcaaggggtcgttttcatctttcagcttattcggggcagttcttggctccccgccgcctcttggctgtcttgggggagaggaatgatctctgctggtctaagtggaccttgtgaagtcccctggcgatcaggcttctgtctgagcagggaacaacacagcctcccagggcccgctgggaaccccctttctgctctggcccactgcaatactgggccgaaggccatcttgccagagttggggcaaagtggaaattttgcaaagtggagaacacaaggtcctggaactctgcttgggcactggcgaggctgtggagtgtccccaggcccaggatcccaggaattaccccagcacaatgtagggccaatcaaggaaggctccccagaggaggcagcactccggttacattttgaaggggcagtgggagaaacagcagagaaagggggctctcgctgagggaaatagcatgcactgaggcctggataggaggctgccgccagtgccacaggctgaggtgctcattggtcctttgtttttccaaactctcctaggtttcggtccccctttgtggtcttctgtgcattttttttccaagtctctcttctcttctttactgctctttctggttccgggttcccgtctccgttttccatggcatgtggtcctgctcctcctctgaggcatcactcactgggtgaggacagggcttctgttctgcaccctttaaccgggtgccaggcctgacgggcagctcctgctgctggggagtatgtgcacacaggcatatgtgtgtgtgtgtgtgcctgcctgcatgtgtgtgtatctctgtgtgtgcatgtatgtatatttatgtatgaatgcatgtgtgtgcatgtgtttgtgtgtagggggtgtgcctgtgtgtgtgctggcaggtgcgtatgcgttcacgctcatgggtatgtgtgtgtgagtgtgtatgtgtgtgcgtgcattgtgtatgtgcatgtgtacatgtgtgtgcatatgtgtatgtgtgttcatgtgtttgtatgtatatgtacattgtgtgtgtatgtacatgcatgtgcgccctcatgtgtgtgcacatgtgcctgctcaagcttgtggtcagagcctctgtgtatgacctgagtcctcaaggtcagggctcctcccactcttgtgcaatgagctgtggtgtttatagaatggtgggataggggatgctggctgccagatcttagaggccgctgctggcctatgggggcctaagcttatatgcagtgggagtgggagggacctctagctttacctctcatgatgtctgcgtctattcccacagtccacgctgctccaggcgctcttcggggtcttgtcattcacctcctccctctcttgccatccccagagcagaggggtggttcctgctgtcttttaagttagggtcttacatagccgtggtggcaatgaactctgacaataaccaatgaccttgaactattgatccgctctggggctgagattgcaggtatgtaccaccatatctggtctatgcgttgctggggatcgaacccaggtcctcatgcatgttgggcagatactctaccaactgagtcacatccctagtgggccttggtgcctgctatcttttgagaaagaccagagagttggttttcagagtttcctctttgccccacttgtgtccctatggaaacacagctacctcgaggtcacacagggaggggctagacccagagctccctcgaaggccatgagataaggctcggggaagctaatgtaagcttgaaggtggaggttcaaaaccactgggcagatggaggcattgatgggatatgtgtggatgaggggatcaaggctgggaggaagaggggtatcatggcctccctgggcctttgggcagatgaatgtccaggttgatggctctgctggtgggactctcactccatccacagaagagacatggaaggtcacccacatggctcatcggcactgaatcagacttggcctcactttggggtcttaggctattgacactgtcctgatcgtccaatcacacgcatagtgacattgcttttctgtgccttggtttcctttagaatgaagtcaggtggagagaccaacaggacccctaggccagggtaggcaccagagttgtggcttgggatgctggttgaactttctgaccctacaaagtcattttcccggagccccctctttctgcctggggtgtgcccagtgggggtgcttttgcgtttgtacccacctccctctgaatatcttacttttcttggcagttgggatacaagtgtctttaaagacaacatactgaaagtgtcaggacttacttggtcggggcagcggaggtctgagctctgcagaccgtgacccaagttcacctggtgccaagttcaaggccctccaacttgccggcggtccttccccagccttagggcacagttaaactgtggggacttagagacactgctctcacatgtcttctttggggtcccatgagttggtctttcacgcagagtgggagccccgacttagactcgaaccactggggttcacctcatgccccttcaccctggcagcctctgtctttctgtctgagaagtggggatgtcaccttggacataggttgtcacagggttctgtgacagaatgtgtgacagatgccaagcggtgctggcccttagcaatactctgtccttggccctccccagcccccacatggtgggaactggcctacttcctcccattcccaaggcagagcagccttttgtgttctgacatttcctctccttagtgtggccggtgacgaagaggtcatggccttcctactctccaggactctgtctacagggtgaccaggcaagagggcatggcttggcattcagggcacaggctgtggctgccaggtggcagaaatgggggagtgtctctgtccctgcctccccttggatcttggaatgtctcaggcccttctctgtgagttgtggaagccgccctgttggccccagggctggctctgaggggaggtgagctccctggaggactcagctcattttaccaggctgagaaatgggctcatgttctttgccctctccttgggattgagagtcaggagtccaattacagggttccatctgggccccaggggacaggcaggtggcctcctgggacctcatggaaggcttgtcctgggccttggcagaggggtgacattgaacattggctcggtgttgttttccagcgctgacgtcagggctgcggtttagagtttcttcccagacaaaggctgctttgtagctttgggtgagctgagcccaggactctactccaggtgggaggctgggtggaagagaagcagggctgggcacaggagccctcagaggcctggctcccctcagacccaacaccacttggcttcccaggagccaccatgtgtcccttcggacaaagtctcttcaccaccatcatgctactagtgggggggaagctggtctctcaacccattgcacagatggaagaaccgagtcttggaaatgtaacaaaaatgtaaaaagaatccttttcttagccagagaatagcagagctggcagtgggctcgtgggcttgagtgtccttagcttcaaggattcatctcccatcaagccgaatctcacctccagccttggcagtgtgtttaaaaaagttagggaccccaggagaagaacagtgcaggcagaacttagctttcagcagggacaggtctgacttccctttctgagattctggattggagcgtgtgtgacattgtgtaggtttacccacacgtgtgtacatgttagagagggtggctgggggggggggtctgtagtcaagggaaatgattccaggtaagtagccatcccaggggacactgtcttagtcagggtttctattcctgcacaaacatcatgaccaagaagcaagttggggcggaaagggtttattcagcttacacttccacactgctgttcatcaccaaggaagtcaggactggaactcaagcaggtcaggaagcaggagctgatgcagaggccatggagggatgttctttactggcttgcctcccctggcttgctcagcctgctttcttatagaacccaagactaccagcccagagatggtcccacccacaaggggcctttcccccttgatcactaattgagaaaatgccttacagttggatctcatggaggcatttcttcaactgaaggtcctttctctgtgataactccagcctgtgtcaagttgacacacaaaaccatccagtacagacacctaggacatttttctcctccttttcaggatccatgttttccatctttctgtctattcatccatttaaccatccacttttccactcacctatccatccatccacctatccacccacccatccatccatccatcatctgtccacccacccacccatccactcatccacccacctacccatccactcatccatccatccatccatccacccacccatccatccatccacccatccatnnnnnnnnnnnnnnnnnnnnnnnnnnnnnnnnnnnnnnnnnnnnnnnnnnnnnnnnnnnnnnnnnnnnnnnnnnnnnnnnnnnnnnnnnnnnnnnnnnnnnnnnnnnnnnnnnnnnnnnnnnnnnnnnnnnnnnnnnnnnnnnnnnnnnnnnnnnnnnnnnnnnnnnnnnnnnnnnnnnnnnnnnnnnnnnnnnnnnnnnnnnnnnnnnnnnnnnnnnnnnnnnnnnnnnnnnnnnnnnnnnnnnnnnnnnnnnnnnnnnnnnnnnnnnnnnnnnnnnnnnnnnnnnnnnnnnnnnnnnnnnnnnnnnnnnnnnnnnnnnnnnnnnnnnnnnnnnnnnnnnnnnnnnnnnnnnnnnnnnnnnnnnnnnnnnnnnnnnnnnnnnnnnnnnnnnnnnnnnnnnnnnnnnnnnnnnnnnnnnnnnnnnnnnnnnnnnnnnnnnnnnnnnnnnnnnnnnnnnnnnnnnnnnnnnnnnnnnnnnnnnnnnnnnnnnnnnnnnnnnnnnnnnnnnnnnnnnnnnnnnnnnnnnnnnnnnnnnnnnnnnnnnnnnnnnnnnnnnnnnnnnnnnnnnnnnnnnnnnnnnnnnnnnnnnnnnnnnnnnnnnnnnnnnnnnnnnnnnnnnnnnnnnnnnnnnnnnnnnnnnnnnnnnnnnnnnnnnnnnnnnnnnnnnnnnnnnnnnnnnnnnnnnnnnnnnnnnnnnnnnnnnnnnnnnnnnnnnnnnnnnnnnnnnnnnnnnnnnnnnnnnnnnnnnnnnnnnnnnnnnnnnnnnnnnnnnnnnnnnnnnnnnnnnnnnnnnnnnnnnnnnnnnnnnnnnnnnnnnnnnnnnnnnnnnnnnnnnnnnnnnnnnnnnnnnnnnnnnnnnnnnnnnnnnnnnnnnnnnnnnnnnnnnnnnnnnnnnnnnnnnnnnnnnnnnnnnnnnnnnnnnnnnnnnnnnnnnnnnnnnnnnnnnnnnnnnnnnnnnnnnnnnnnnnnnnnnnnnnnnnnnnnnnnnnnnnnnnnnnnnnnnnnnnnnnnnnnnnnnnnnnnnnnnnnnnnnnnnnnnnnnnnnnnnnnnnnnnnnnnnnnnnnnnnnnnnnnnnnnnnnnnnnnnnnnnnnnnnnnnnnnnnnnnnnnnnnnnnnnnnnnnnnnnnnnnnnnnnnnnnnnnnnnnnnnnnnnnnnnnnnnnnnnnnnnnnnnnnnnnnnnnnnnnnnnnnnnnnnnnnnnnnnnnnnnnnnnnnnnnnnnnnnnncccatctacccacccatccacccacccatccatccatctttcttccttccttccttccttccttccttcttctggactccagtaactctctgtggatggggccttccccagtgtctgtcaagcagagccagaagaagtcttacaagttattgcgtccccccaccctttttcccagagaggggctggtgactgtccaagttgcacagaatgttcatggcagagccaggattcaggccagccccgtgtctcccctttctgctggggtgacagacagctgtcacccttagcaggcagctgccttaacttatcgcactcctttgatgtttggtctctgttttgagacacatgtacagatagcagaatacagccttaggctggatcccagattagtttactggctctgagctgcctccctcaacctgagcatcagttagtggaactcccgagggccatcttttccttgctagaccagtttgggagtccaacccctgcccccaggctagaaccattgaaaatcctgttctctgttccaactgctcctctgggcctgccccttcctggtgccttccagcaacctttcccactgggataagcttcctggtctatagacacagtcctgaatgcttcgctcccctttgtggttttttacaaaacaaggagagaggtcatttgaacatcactgcctggggaacaaggcagctctatgccctgctccctcctctgctgccatcctgggggtttgcgttgacccagacacaagctagggcctgctctgtaggaggctctgcctgggcttcggatctgactggagtctcatgaatccctttaaaacagaactggcatgtctccctggcccagacccatctttcttggtggggaaactgagtcccagagaggttgaaccctgtggctatggctgctcagccaacacagcagagctgggtgccagcattcaccagtggccatgtttctgtttggatagagcctggacctccagcatggggtggtgcctgagaggtggtggtagagggttgttctggactggtatcccaggaaggaagaaaccagtgccttgtgcctccatagatcaccttctctgtgtgccaggagacctgagattctactccagatcctcactcgaccccaggggggcccctcagtctctcaccgtagggggtggccagaaggcctgaaagtgcactggtaagtgctcagggaaggaaggggttaagcagtcttgccttccaggcctaggttcccagctggtgtcttggcccctcaggtcagccaggccatctggctgacagatgccttcctatgtcccatctgtcccaaggcaaagtcaccaggaggagacccgcctgctgtctttgtgaacctgtgggcaagtctgcctgtccctgtgagtctaggccacttgggaagggtccatggcgagcaggctggcctttggccactctccctgatgcctggggtctctgctgtatggtgagagagtctgatcttttggtaaagatagtctgagagagatgcagggacaggcccagggtcacacagcgggttagtgtgggcaaggagagacatgggacatgcacagctcttggtcataagcttattcacctagcaaacatcacttgagggcctattgtgtgcctgggagtaggaactatgagaacaaaggttccaagggatgaagggcacactgtaccctggcacacacttggggcctggatgctgtgacagctcttccagcagccagcaaccggccctgtgctcatcatcacaagccagtgttgttaccccattttacagataaggcaactgaggctcaaagaaatgaattcagttttgctagatcactggcttgggggtgaccgagttgggtcatccttgctggtttgtctgatgtcaaagcatttggagtagaggtaggggacacgtagacatggtctcatccctaccgggacgtggattcctgatgttttggtattcagacattttcctttgaacatctggctgaatccaagctgaaggtcatgtagctggaggggccagtctcagagcgcgtctcgggtgaggacagcttagtcagtaatgtgcttgccttatgagtatagtgactcgagttcaagccccggaacccacatatgaaagtggaacacagaggtatgtgtgtgtgtgtgatcccagagctagaaagcagcagacagggggaccttggagtctgctggccagccagcctaccctacatggccagctccaggatcagtgagagatgctatctccaaagaaaaaggcagaagagaggcgggcagagaagaatgacctcagggttccacacgcagatgcacacacgtgtatgcatgccctatggatggacatgcacacacatacatactcatgcacacatacatgtgtatacacacacacatacatgtgtatacacacacacatgtacacataaattgggtgggaaaagggaagctattggtgttgccaggtggggttggggcccttgcaggcaccatagacagcacatggggggactctttgggctgtggaaggagccatacaggcctggcagtccagagtggagcccttagcactctgtctttgaaatgtcagtcagtgagtcacctgaggctatttctgattttggggaaactgaggcaccattcctcatccttctcccttcaggtaaatcacctgacccaagaaaactagtctgggccctgagatcagagagacccaggttcaggtccagcctcagccctgtcacaggacacagaagcaggggagtccgctggctggggacacgaacctgagacccagtcacttccgattccggtgctgtgaccctggcagtggctttacttcttggccttcatcttcttgtctttagagcaagcacagtggtgattcctgcctcgtaaagtgtctgagggcctcagcttccccaccagcccaatgcccgtaaagactattaaagacgtgggagactccaaaaagatactgtgcccctctaggaaccatgatgccacagaagagtctctgagactgcgtgctccaattcataaccgccctgccccaccccaccccatcccgaggaaactgactgcataggaggagacctgggcctcagggagaggtgacagcgaccctgtgtgttgaggtggggtgcctgttacccacctctgtgctcccctctggttcacaccaagtgccaaggttaccatagcagcccaagtttgctaatgagaaacaagtctcccttcgcactgagcggtattgagtcactcaactttttcccctgtttgggctaacccagtctaattaccagtcctgacacagcctggagccacctcttcccagccaactagattgactgacgggaaggtggaaggcgtgcacaggcattccctgctgcaagccctctgtggttgcatcaacccatgcataattggtaggtcctctcagtcttctgccttccttctggagaagcccctgaaggggctccttccccttgtcagcggcatggcctgaaacacacctaacctggcatgtcctgcagtcttctgagccccttgaagaacggcctagacactgtgtgtccacttcgacatgatggcatccagtgttaacagctttttttttttttttttttttttttttgagaggccatttggagaaccactatgtgcttggccattctcatttaatcaggcagggcctctcccactttacagatccgagactggggcctgggccaggaattctccaagctgcaaagcctggtgggcacccgtccttgccaggctgtggacctgtcgtttgtccgggcctcagatgatgataaactggggtctgaggcagtggcatggctctgatgggacatcacctgagcttctgtctcacgctcaacctgctgccactcaggcactggcaataaacagtgagagatccaaggtgcatattaactttccagaatagccacgggggttgcttttctcaaagctgtaaacacatctctgggtggggcccacaccctgctgggcacaggtccttgggagcctcctgcgtctgagcttggggatccagagacgtggtgcccagaccctttgctggctcctggcacaggggacagggaagtgtaaagtcactgagggcttgaccaggcaaaggcactgaggcagtgtgaggaactgtattaaagggtcacaaccttgggaagggtgagaaccactgctctagatagagacaaactcacatgcaaaggccagaggtgagtccggtcaggggtgatgggacagctggtgctgggcacaggaatgggggtcttgctttttctcagctttccgggcacccggaagtggtgggtgccacacccaccagcccatctagagaccccacgagtttaggaaggaggatttgggtggggttgttgaattattattttccatttctctccccccccccccgcccggtttgttttgttttgttttcctcctgtccactctaagtcgtcataaaccgctcagcagtttccaacagtgagatggattgaccaggttcattttaagttttgttttcttcttacaatggaagtggtcctgactggatatatgtgacatccttcaaaagtaaaaaggttccaacacagagtgtatcgtctgtttcccgttgctcgaacaaaacacccgaggctaggcaacttcaaacggttggtttagcctgcagttttggagattgaaaagccaaacagtgtggctcggggctgtgttacaccaaggtagacggcatcttggagggagttgtacaattgcctggtgagacaggaagccagggagcagggaggagctaggctcacccttcagtaacaacctctgagaaccttaatccctttcaggggaggcctgggaacaggaaggaagtcattagcctggggaccaggtgacctggattattgagtttgaatcctgttctgcccaccttgaaggcgactgtgttctgtcccctcactgtcccctgctggtcactttagacagtagaaataccagttgactgaggcattgattctagaaggttctgggccctgagaagtgagttcatgggcaaagaacattatccttggctgaagagccctttttcaaatcgatgaccttgactctgtgtgcacacctgagtatcctctccccacccccaccccctgcccctccgtcttggcactgtaaccttaaacattttctgagcagtgtgctagggcacaggggtaggagtttgtggaccctggagcatcagcgttatcactgaggctaaggagttgcatggccctgggcccagtgttagctagtgctttggcctgggcctcagtattctcatctgtaaagtggggtgatgatgtctggctcagtggtgtaaggaggatgtgaggtggtaaaaatctcaaggcattgctaagtattgtgtggacaaagcaagtctctcccacctcgtgggagtgccgtgtctgaccacaggggtagtgaatagaaatttatggacatagcggcagcatatgcagggggaaacaaggagacaatggaagtatcctaacgctggaaggggttggaaatagtaccctagaggcctcacagtggcctgagacctagattccttgctagggagcacccctgagtcctttttctttatggaatggggcagcctgcactcaggcctgggctctggtcagagatgttggcagaagcatcactggccagcattggctgttcagcatgccactcagaattatgggataatgggtatcctgtagtggtccctgacagtcagggatactgtacaacaggacagtggcttgtataagacagtcaggtgacccgtgctcctctagggcccactttgcctgcagatccaccagctggtccaaaggacactcttcccccctccccgctttgagacaaagtctgttatgtagcctaggctgtcctggaacttgctatgtagaccaggctggcctcaaactcacagagaacccttgcttctgccttgagggctctggaagtgaaggtgagtgccagcatgcccagacacgatgacactcttaatgtcttgtgcctgacatcagctggcacctcctccctgcatctcacatgcccatggtggccctggttgggagagacctcgaaggaccaggcagagctcactaatgcgtggggtgcattgtgggtgtggcaggcacatgcagatgtttgtctgcagagagttgcgtggcattagcacctggcttcttttcccctgctgcccatccttgcgtgcttctgattccccgcccaagtgagtgacacctagctcattgtcacggctgtcaccagtgattatgcggctgggaacttaggggccacatagcctggatgccatatggcctgtcacagtgttgctgaagtatgcttccagtctgactgtcctaagagggtcccgaggcagaggctgaggagtgtggtctgcatgcccatggcacgccaggctctgttctgggctccctccatacagtaggtcctgacagagttacaaacagcatcgacatccagagagggtcggtaacttgctcaaggccatgtagctgtgttaggttagaccttcaagctctgggcccctcctcctctctccatatactggttgctttaaccttcagggctcacttcccagctgactctgggatttcgatgctcatcacataaccatgtggttgtcataggtgtttgtctagggaccgcagaaattggttgctgcttgctccggtggttgatgagaattaacctaagttggcctcctgctgtggctgagagggaagatatttgcctatgatcacacagctggatagaggcagacccagggcttcctgaacatggctggccacctcgggactcaaaggagtatgggccagctagggcctgtcatgctttgtctctgcccctcccgagacccggtggctccacgcacacagcccggagctgcccttggagactgttcttggtcactggcaacagtctttggctccgtagcagcatgtgcctagtggcgtaggaactgttggaggcagaaggagacttaggagtgagcctttgcatcccttctttccatcccttgcttgcagctaggcacaggaggttcagggacactctctggtgagggttggcagcggagccaggcactgtccaggacagtactgcccatcgtgtagggctttaaccagggtatgaaaagaacgctgtagtcgcaatagccagagagtttcccctcccccctcccctgcacctggaacagggtcctatgtagcagatcggctttgcattcctttacacatctgaggctgctttgaacttctgatccccctgcctccactctggagtgctggaattacaggtgtgtgcaccaccaggcctggtttacctggggttagagaaagagaagcaggttcctacaattgctaagtaagctgccaacggagctctatccccagacccgagatggattcttgatgatgctatcacagatgagtgtgccgcacgcggcccagggtcgagaagagacttgcccagattacgcagtgaattcgccacagttgctactcaagcatctcctgactccgtacccctccccccacccctgtggctggcaacccagcctaccctctgcccaggagccttgcaagatgggtcagatggtgaataggcctctctgtgtgtgatggcccagcagtgtgctggtgcaggactgttctgggtgtggagggttccttaaaatccagccccatcaccagcctgctgtttgggctctggcctgctccagctattatcgcctgtaatgggatcggccgcctgggttaagtgttcacattaaattaatacctcctccgtggagacaatcagctggcatttaatttgtgtttccttctgagcagcggagtacagctgggcagtcctagtgggcatgtctgcatggcagcgtcccaaagaggtggtaaggtggggtggtacccagaaggcccaggcaggcacaggtgggtaggagcatgggagtgcagggcttccttccgtagcgggtgggttcacttgaggtccctggctgtcaccttcactgcctatgtgctggaagtcccgggaaggaagaaacggggagaggaagggggggggagtgctttctgggtttgtggctcagcctttagcttcctgaggcatgggctggtggttggtggtgccctgggttgtcaaggtgccctaccccccacccccgccctactccctcatcatttctgtattctgttgcagactcagaggggctgcagtacagaacgaacgaacgggtgtggtgtagagtgaagatgtagactcagtcaaggttactgagcccctttggaaggtgcagagaagccagtgaggatctgggccctcccagaagaaccagccctgggctgtgcggcccaaggctccctggttggtctctgctgacgctcctgtctagcacataagggcctgaacctctgctctgccggaagccccttgtctgcccagacctggtcctgccccagggtagtgggatgacttcccccttggtgagtggggtggaacagagaaggcttaggcagaccacgggaaaggaagctgccgtccacccccacccagggccagggccaggccccagcccacgcttggcccagagtgaagttttccactgagggctccagcccagcctcacctgcgcctgtttcccatcacctgagtgagtcggcctgggcgtgcctgctgccaggcgggaccattcttgttgtcccacccccaccccaccctgaggctcccgcccagcgcccttgcctgcctggcctgcacttggagctagactgagctgaagtgcaggatccgatgctcagccctgtctcggcgctggggtcttcttcaccctcctcttcctctacttgcagagtggttcccacaactatcttcagaaatggggaatatagaaaagcaactcacaaagggcgatgagttcgcctgggatatcacagccgggggatgtgggaacaggcgttggaatgttaccaaacttggagtcgctgtctatacccgaagaagccattcttgagcagctaattaaaacagccagattaatagtgtgagagaggaagacgttctcagtgtggccacactggggagagggacaatgaccccctcaagtcactcttgggggctcgaagcgaggggaagtgtttaaatagccatgggtttgagcatctatccagccttggacagagtgcggttctgccccgccactgacctatcatcgtctggcttcaccctcattggttaaaactgtgtggaatccttttccaggagaccaggttcccttttggctgtcgccttttcccttgcgctgttatgagattccttgggggggggggggttccatttcttgaggttcattgtttccgtagtctgatagtcaaatcaaggggggcataaaagtgtctcctttctgaatgtcttcatttctgcttctgtctgtacagtnnnnnnnnnnnnnnnnnnnnnnnnnnnnnnnnnnnnnnnnnnnnnnnnnnnnnnnnnnnnnnnnnnnnnnnnnnnnnnnnnnnnnnnnnnnnnnnnnnnnnnnnnnnnnnnnnnnnnnnnnnnnnnnnnnnnnnnnnnnnnnnnnnnnnnnnnnnnnnnnnnnnnnnnnnnnnnnnnnnntgtctgtcagtctggggactctgggatggactccccatgggcccggggttgtctgtgatgctctaattatttgctggggctgcacccactttcttctggggcctttgagcctttctctgactgcacaggatatgaaagacccatgagtcagcccctctgtcagcggcttcagattgggtttccgtttctccgtagctagactttgtgggcttcttcctgcttctgtgtgtcattttgagctcatgcaagaggcagaactactggcctggttccagcagctcggactaggctggctttaaagctgcctcccccaccccacccccagtggtcagccgagatttctcatctgtcacgtggtcctagcgctggctcctctggaatgctgagaggccacatctggctgtgacgaggctgccacctccccctccagctgccaggctcccacatgtgcctcttccgccgccgaggtggtggtggggctcctttgtggggtcatttcctctctctgcattgattgtctaatgtccctgcctcccctccaggccttgaaaggttgtaagtcgtgggaggggaaggcttctctttctcctgcaagcttcctgtcctggctgtattttgcccctcccccaggagggatgtctgagcccagtggctgtagagagagcctggttgtgctgggaatttggttgtggattcctcagcctgggagataaagataagaccctggggtagggctcaggccgaaggaaggggcctgagtgtggatcatttcattcattcctgcccccagccccattcatcccctctcccattcatacacacacacacacacacacacacacacacaccctgcccccattcaccttcatacccacctatccatctacctattcatcttctggtctacccatctaacccatgccctttcatttaataagggtcagcaagatggctcagcagggaaaggcgttttgccaccacataccccacatggtggagagaacggattcccgttccaatcgttgactatcacactcctaccaagaagagatcgcaaggctggcctctagctgtagactcagctctccctttgcagagatcttcttttctctaatccctccttgcttcatctaaccagggcccagggtgctcagagcaaggtgaggctgccctcagatgctggcatggtgaagagggtggaggtggcctcacttagagccctatcgttatccctggcttcattcttagaagagagctctgagcggtattgatgcccaggccatctgagaggatatatcctggtccctcagtctgccttaaatctgtggcggcattctgagagagaaaagcctcggaggaggaggaagaggagcaggctaacccttgcctggaggctaacattcttcctcatcttcaacatgggagcagtccttgggggattaaacgctcccagtataagaacacaccttcctctccggttcttgcatctgccacaccacacttagaagtcagacgaactgagtgtcaggacaaaatagaaccaaccacccatctgctcacaggtggtctcttgaaggtgaccccagccccctggtctagctcagagccacatcctgataggagtcttgggaacaaaggctttcaggatttcggtgaagctggatcctggggaagatataccacctgcctgtcccctgataacccaggcagccagtggctgaagggcagagatttctgcactgtcaacgtggcagccagctgtgccagatttttctgctgccacccctgggaagggcatctcttcggggcagtgggctcaatctgtgtagccagctgctgcccacattcagggtctggttttttttttttttttttgtctcctgtggggcagagaaccagatgcacacctactccagctttggaagtaaaagactcaggaaattattcctgcaaactcatcttcaggatgcagcctgagaaacgcgatggaattagatgcagggtctggggtgagagggaggggagccgggaggtggagacactgcatagtgtggatacacagagtcataggtaggtttgcaccacctgggagctgtctgcctcctcagacttgctgcattgggttttatgtgggggcaagatggccgagtggtttgcctgcaggaactaggcgctgagcgaggttcaggtcccagctccttattcccagctgtgtgactttggaaaagttacatcatttctctgaaccccagctctgtcaccagccaagtagttctggataaaaacctgaaaggcgctgggcgtggtggcgcacgcctttaatcccagcacttgggaggcagaggcaggtgaatttctgagttcgaggccagcctggtctacagagtgagttccaggacagccagggctacacacagccctgtctcgaaacaaaacaaaacaaaacccaaaaaaacaaaaacaaaaaaaaccctgaaaggcttagtaattcatgtgaaagccaacgtgtgtctgagggagtatgtcttgtatgggagacccggacagcatctgccaacagagcgatccagagacaagcatgggtgggtaggcaagcctgactctgacttctggcttggtgggtaactggaggaaagaaaagttagggtttgctgcattccaggggtgcctggggcgccagtggtgtgctgttctctcctcaagtttggcttggttgctcctgtggttggcatgagagggcctggcctcagatgccagggtgcagccagttccacacccttacccttccttgtgcctgctctgccctcctccactagagcagtgtggtcagggtgatgatgagtcagcctggtcctgtgtcctgggccttcttcctggaggaagccctcaatggcctgggctgctactaggggtgagtgtaacctggcaccccttccctccacaatggtcctcaatgaacgatggcttgcctctggggtcagctgcaaccctgacgtgctgtgtaaccttgagcaaacgtagcctctcagttcacctctgtttgggggtgggggtggggtgtcatctagggagatggcctcattcatgtgtcccctctgtgttctctgtagttccagactgacactcagggcagatgtgggccctgctatacagccagtttaggacgaagtggacacatgtcctctgggagcctggcagggaaggcttgtgtggcgagaggaagaattttcctccaagtgtgcaaacagtatccattttctcttgtttccaaaagctgatgacataaccagcccttcatccagtcctccctctggcctatttttagctgggccccacagcatcttaagagacctcagacttccttgctcagctaccatgtagggagggtagcatggagtgaggaaagacagaagcctgtctgtttgtcccagaggctgccagctcctccgggcagggagcagatcttagtctcagagtcttagactcagcttggaggccgagtcctggctccccctgtctttaccacacatgggtaaggggctctcagccactctttgtttatctgccgaggcatagggaaaatggctgtatgcatcccccacactgctggaggcctgagtggccttatgtaaacctctctagggagaagcctgtgccttatctttgttagtatccttgattgacacagcttcctggagttgcccctccctatattgcacagttcatgttggggtacacctccaatcctgtgtgctcagttcctgtcttttcctcttcagcttcaaccgatgttgtaggggtagtggtctctacttaggatctgggatgcctatggttgagatatgtgcctttgggtaggatagttaaccaaccattgagctcaggccccacatctataggactgtagtacctgcacaggcctgtagggtgtgctgcagagcgcacagccttcgcaatagtgtttggcattggaaagcttgcttcttggggtacagagaagagtccgaaagcccagctttggtaatctaccttgcagcaacagctgggccagcagttttcgtggaggaggcacgtgtcccctacagtactatgcttgagcctcaaaggtagcatttgcggccacctggccttgtgattagcaacagtccactgtcatgttgctcctcctatctcgaggctgggagcaccttgaggacagatgcggattttctgaggcatctctctgccctgcgtggatgatgagggtgggctctgggggctgcctggcagcaggaggtgtgcgctgaccatttgttcttcttggctgttgcaggtgggaggaggaactggccaaacgcatgaaccttcagaccatggtggacacgctgcaggaggtaagagttccccggattccctggtgggagctctgcaggttagctgtgggaccctggtggggaaagctgttgctccagttaggactgatgtcttggtgagatctgggtacacagggagcccccagcccaagacctgagggctctcctgttgttgctcgctctggctgcgctgcacttggggctgcccagttcctgtacttacacggaccagagcagcaagctttatccaaacccggcttcctctcttctttcctctgtcacgtgatcaaaactagcaacacaaaaggcaactcagacacatagttaaaaaaaattttttttttttacaatggggtgtggcaactcacatgtacaattacttgagaggtggaggcaggaggatgagggattcaaggccagcctggaatgcactgtgagctccaggcagcttgggtttcctgagaccctcactgaacaaaacaaaactgttttaaaagttgggctggaggtggcatctcaggggcggagcacctttcctgtcttgtacacagctttaagtttgatctctgcacggagaaaaattaaaaattagaattaattaataattaaagattaaacttactagctaggtggtggcagcacctacctttagtcctagtccttgggaggcagaggcaggtggatttctgtgagtttgaggccagcctggtctacagagtgagttctaggacagccaaggctacacagagaaattgtgtctcgaaaaaaaccatataaataaataaataaataagtaaaatgactttattttttacttatttttcactttctagaaaagtagaaacacgggttggttagtagaatgcttgcctagcacacacaaagtcctggcttcccagagttaacgggatttggggcatacctgtaaccccagcatttgagatgcacaggaagatatttgaggaaacaggaagatcagttcaaagttgagccaggcagagtggcacacgtttttaatccctgaattgggaggcagaggcagcagatctctgagttcaaggccagcctgccttacatagtaagctccaggacagccagggctatacagagaaaccaaacaacaacaacagcagcagcaggagcagcaacaacaacaacaaaagaagtttaaattcatgctctgctacataaggattctggtgtccccagccatagtttggtcccatcccttcaattattacacagaggccaatgctctcctttcttttataataaagttttttttttaaacatattcacagtcagatgttggaaaggtccatgagatcacaatagattaaaattacctgcagttctgacttctgctgtatcaggtttagatgtgacctcccagccttctctgcagacacacccacatcctaactaacgcatgccttgggatgcccatgctagactggcagacgcaaaggttcaaggccgagactggtcaggcattggcacttggtggttggggttgacctggtattttttttttaaagctggccttaagctcatactgctgcccagtcttctttgccataagtgaccccctgaagtgtcactggggctcagcagccagaaaggctgaggcacacagttgcttagctttagtcagccatcactagaagctaacatccagggctctgggcttgggctcaggtgtccatcctctccctttaaagcccgcctctctttttccgtccacaggcggcgcaagaagccgaggctatccaggaggagatgaacgagaagattgagcggctcaaggccgagctggtggtgttcaaagggctcatgagtgacgtaagtggtgtggccgtcaccctaggcatcacgacctccctttacccgtcatgccaaacgcttcattcactcggaggctcgagctcggcttatagttacagtcgtggctggctggtttgttctgatgagggatgcatcggggaccaggagcctccccaccctcccgacattgctttcctgtgtatgaatagagttgctttaacccgctgcttaacccattgcggtcctcagggccctgacatctgtatgtgttgctcgactgtccccagctcgccacgtggcgaccttggtgtctgcagaacataggtgaccgaatggccttggccgtgccaacccaagagacttcagactcagggcatcctcctgtagggtgtccttgttaagttgggaagggctggtatgtgcatcttcttggccatctgggggaccctctgagtgagccaccatgggtggaaacatctgttagcagtgtaggcttcctcgactctgggacctgaggttttttgccatctttaggcagtgggtggtctgccaggagagcccactgaaagaaggagcctgaacttggtgactcagcctggcttagctcctggctttgtgggnnnnnnnnnnnnnnnnnnnnnnnnnnnnnnnnnnnnnnnnnnnnnnnnnnnnnnnnnnnnnnnnnnnnnnnnnnnnnnnnnnnnnnnnnnnnnnnnnnnnnnnnnnnnnnnnnnnnnnnnnnnnnnnnnnnnnnnnnnnnnnnnnnnnnnnnnnnnnnnnnnnnnnnnnnnnnnnnnnnnnnnnnnnnnnnnnnnnnnnnnnnnnnnnnnnnnnnnnnnnnnnnnnnnnnnnnnnnnnnnnnnnnnnnnnnnnnnnnnnnnnnnnnnnnnnnnnnnnnnnnnnnnnnnnnnnnnnnnnnnnnnnnnnnnnnnnccttggcctaacttgaggcaccacagccttccttggaaggctgttcttcaacagtcacaacggtcttgcttgtccttcgctcaaactaaaccaacattgttgtgccctgcagttctgagtgggaccagcacacatggcctcacatcttccctcctgaagtccccatgtcccttcccaccctgagcagtgcccaccaaccccacccccaccctcaggaaaggctcaacccgctccccaactctctctagggcttacctgacccctagggttctcctaactctgagagcccctcacgcttgcttcgtccctcgctcatgtaaccccccgctgtcctccaggggccgcctgacccctcaggttctccctactcctgatggccccctcatgcttgctccgtccctcgctcatgtaaccctgctgtcctccctgcagcccatgacagacctggacacaaagatccaagaaaaggctatgaaggtggacatggacatctgccgccgaatcgatatcacggctaagctgtgtgatgtcgcacagcagaggaactcagaagacgtgtccaagatcttccaggtgaccagggccggccccgctcacctggctccaccccaaacctcttagaacagccctgagcgccaccataccctgtcagttcctttttccttccacatctcgctcaccccgatcctgagagtcacatgacacctcccccccacccagggaaatatgacttggggatttgtagttatagctcagaagactaaggcctgggaggacaggccgaagaaggacatgggagatctcccggccctccagacatgtccccaggtgtccccaggtccactctgcacccattgcttctcatgcagtctctttctctgagattccacattgttcccatggtggagcagccctgacaactgggcagcaatgggcagttctggagagggacggggtgtggtcatgttaatggagggtgtgtgtcattctcagaagtcttgggtcatagtttggcttgtgctttagcccagggcagtgcagtgtgttgttgctttctgtgtgtgactctggacatggttgcgggaggcccaggcctttctccatctcatgctttcttgctggggactgatccgtctggagagctacgcagccctcatttgcacgggtcttttctgcttggagcagagcttggtgaaccctccatgcctctgcacgtgagaggaaggttctggaagcatgcagctcttttgacctttgtcagggtttcttggtctctcgggctggctttgagacatctcaggtgatggtgccctcatctggcctctccttgttccacatcatggggctgctttttctggtgatgggtgagctgagctggcccagtcaccaggcaggacttggtccctgtgtctgtgttctccacctgcatgcctcacacctcacgcttcctgccaatgctgcctgcttcgtagaagacctatgcaactccctgccgtggtggctggtcccagccatatccgtccactcctcgggacagtggttccctcccagacttaaccccctctgcaccccagccaagcacccccgttaccttggtctttccttccccgtccaggtggtccctaagaagaaagatcgtaaggtggcttcggatgaagacatctcggagcaggacggggaggtgaatcggttttcagatgaggaggtcggctccatgaacatcactgatgagatgaagcgcatgtttaaccagctgtgagtatccaggttgcccagccaggggacatatcctcagctaggctgagacaagtcacctgttctgaaagagtttggagtgtgtgtgtgtgtgtgtgtgtgtgtgtgtgtgtgtgtgtgtgagagagagagagagagagagagagagagagcgcactcgagatcacacaaaaaccagttatcagtctgcgtgtcatttctcaggcactattcactttgtttcttggagtcagggtgtctcattggcttggggcttgctggttaggttaggctggctggccatccagctccaggagtctgcctgtattcctccccagtgcctggattacaagtgcacgccaccagaccaggctggctttcaactcacagacgcacctgcctctgcctcctgagtgctggaattaaaggcgtgcgtcaccaccaccacctggctccacgcttggctctttagcgtgtgtgctgaggattgaaatcaggttctcaatcctgcaaggcaagcattttgctcactaaggcacatttccagcccctagattctttttttttaaatgtatttatttattttagaattttatatctatttatttttgttgtgtgactgttttgcctgcacgtacgtccattttgccgtgtgtgtctgctttctgtggaaagttcaaaagaagttcaaaagaagacgttagaacccttggaacaggagtcgcagaaggctgtgagccactgtgtgggtgctgggagtcaaacccaggtcttctgcgagagcagccagtgctcttaactgctgagccatctctccagcccctgttttttttgttttttgtttttgtctttttgtttgttttgttgttctttaacattttatgtgtgtgggtattttgcctgcatatatatctgtggaccatctatgctcctggtgcctctggcaggatgaagaggacattagatccccgagggctggagttagttgtgagccaccacgaaggttcccaggcaaactcagatcctctaaaagagcagccagtgctcttcaccatggaaccatctgtccaactactagatttttttttttcttagcagggtttctctgtgtagctctggctgtcctggaactcactctgtagaccaggctgatctcagactcagagaaacacctgcctctgcctcctgagtgccgggattaaaggcgtgcatcaccagctgccacccccaccacagggctggattcggtgtattcctttttttttttttcacagtatagaatagagtttattcagggcatgggaaggggagttaagagggtagcagaggcagagaaaggcagagagagggagagagtagagaagtagaggagaagaatagaggctggccatgaccacgtggaggagggggagggaatggggagagagaggcaagacagacaagagcggaagcttcctgttttaaaacttcttgagaccagatatttcattgcaccatccatggctgggtatccagtgcctgctgtatttggaagtgtacccatgatcctttatgtcatctgctgctccctcggtcctgtgggacaccccccccagacaggtgtaggggtgatagtttcagccaggattgcccttcctcgcccaagaggtgaaaaggctgggtagtctccctatttgtatagtctgcctgatgatgtcacgtgtccaggaagggtcagcggcatggtgtcaccttaatgggctgttttcagccatgcatcacacacacccatcttccagtctctcttggtgggctggtgagctgacccacgcatggctcatgggaagagtcttcatagtcaccaagtgtcctccatgaaatgacacttggctaactccagaccttcaccaagcacacagggtcattgttaaccttttgaaggctctggggaggctcagcagtgtctgacagagttaggattcagaccacaacctgtcactcactagtattccctcgccaggaggttctggctaatcggcagagtctggcctgagtgtataggtaatggccagatacagctggttccaccccttgggaggtgtgtgtgtgtgtgtgtgtgtgtgtgtgtgtgtgtgcatggtctgtgtgtactgtctctgtgggtgtctctatgggtgtgtgtgtgtgctatctgtgtgtgtgcgtcttatctgtgtgtctgtgtatgtgtgctgtctgtgtatatgtgtatatgcgcatgcttctgtatgtgtgtgttgtctctgtgtgtgtgtgtgtctctgtgtgtgcatgctgtctgtgtgcaggctcagtgatgtcacattggtagcttagactttgtcattgtaagaaattgacacatgccaccctttaggacaccttaccaaaaacaaaccatagagagaactggtgtaccaaaacctattgagtatgtcaccctggtagcactgtggccttggcctagttggtgctttgttctgaacccagatccatttttaacttgaatacaaatggcacccctaggtaggatagggtgaggaccctgggtgagttaagggcagggctggtagccccacactctcaggcacttggactctgagagttctgcccggtcaccattggcagcatctgacaggccaccagctccttgagctccatacaagggaagcacttcaggggcacagagtagggcgagccagacctacatacgtggtttagtgctttgtccccttagccaccctcctgcttgggagagatgtccatcttccatctgcgccccactgttgctgtctgctgtttctttggctttagtcacatgctcaggatgagcagggtggagttgggagctctcccctcaagacagacctgagacaaggctggacatgccttgtcccttggttcatctttcagcttgagtatccctccagatcttatgttctcacttctgctgacaagaggacatgcctccaccccccccacctcttttgtttttgtttttgtttttgagagaggggttcgtgtagcccaggctagcctcaaacttgctatgtagtctagaatggccttgaactctgatcttcctgtctctaccccttgagtactgggacccaagcctggtttatgtagtactggggaatcaaacccagccccccctcccccccaggcaagcactctgtatccctaggcttttgaaaagaaatgtggcttgggtccagctttttccagtgttgctctgggaactcctgagcctgaatcattctttgatgtgcagacacccccaaatctccttcgttttgttgaataaaagggctcctcagaagaaatcaattatctattttcatggagtccccaggggatggttaatctggtcagaaaggaggtgcagagcagaggtatccatccagagagctgagttgggggcgcctctggcgagggctccctcttgggtgtgcaaaaagcatttagttatgagcagtagagaagtgaccccctcatgtggtgggcacccgagcgttgacagggttcggtgtctaattagatttgtctggctttaaagttgcctaagttaaaaaaaaaaattctttgctcatccctaccactgttctgttcctctagctggtgttagcagctgattcagtggtttctttttttcagatcccacctggtatttccatgagcccatgcatggcccagctggtgggttaccccccaccccaccctannnnnnnnnnnnnnnnnnnncctccccccccccagccagttttagtgaagccttagaatgacacacccgtgtcagaactctgtgttgttttgatccaaatcagtagcttgggcttcagactaaggctgagaggagaattttcgacatccttccaaagtccccgggtgagggtgggggctctttccgtttctgctctcatccgtcttcctgtctgttctggctagccatccctcagcggggctttccttcagatctcagacgctggaaaggaagtgccgtcagtagtggaccatgggatgtgctgatggatggaccccagaggctcagaatcgcctccttttccaataaacccctccaagcttatttcctgactcacaggcgccacctaggggctgctacaagaattgctattgggcaagggaacaagcctggcctacctcaagggggcgctctaggaagcctttttattttattttattattattttttttaaatcagaaatccttccgtgtcattgtcttttggcccccaactcatacctttgttgagtgaggtagagcagagctctaaaagagccaggaaagaatggagaatggggaggcataaacaaagggagactccccagagggaagtctacagtcctgtgccactgagcctcagagcacaagggctgcagagatagctcagcggttaagagtactggctgttcttccaaaagacctgggttcaattcccagcacacacacacatggcaaatcacagctgtctataactctaattacaggatatctgatgccctcacatacaggatacaagcaggcagaacactaatgtgcctaaaataaaaataaatcaatcaggaaggaaggaaggaagaaaacaaacaaactctcagagcctggcatggtggcgcaagcctgaaatcccaggattcttttgtgattttgttgttgtttttgtttggttgttttgagacatgattcctctatagtcctggctgccctggaactctcaggagatccacctgtctctgcctcctgagtgctgggattaaaggcctgcactaccacattgagcagatgcaatagtctttaaggggcccccagttgtagtaatctgtgcatcttggaaaccagtcctgggcaaaaccacatataactagtcttgttcctcctactctagccagaaagcctctaaagttacttggatttttaatttaaatccagtgttagcatagatccagtcagaaggacacccagtcttccccgagtctcagtttgctgacctgtgaaatgaagctaacaaacaagctaccctccaggtttgaggctggtcttagttggcttcaaaagctgtagggagccagcaggtctgggtcgcagtccttcttctgcttcacagcagtggtggctttgggcaagtgtgtttcctcctgagctgtgctctcctcatctgtcaggagtgtgcctgcatttaccctactcaacatggggcaggacaaccattcttcttttgaccagaatcatgtctaaaggatacatgtgtgcatgcatactcgatttgtacacacacacacacagacacagagagagagagagattgattttgaggttgttaaaaagttatttatttattttacggatgtgagtacactgtctttgtcttcagacacaccagaagagggcatcagatcccattacagatggttgtgagccatcacatgattgctgggaattgaactcaggacctctggaagagcagtcagtgcccttaagctgagacatctctccagtccctttgaggggattttattgatgtgaatgagtgctttgccggcatatgtgtctatgccctgtatgcatggagtgcctgtggagtcctggggaggatgctggggccctggaaccagtgttagcagttttaagctgccatgtgagtgctgggaacggatctccagtcctctacaagagcagtgagtgctcttcacagtctagccttctctccagcccttggggatttctgagacaaggttttatactatagctcaagctgattggaactcactatatagcccagactgcccttgaacttgatcctcctgtctcatgcccctgaattctggggttgcacacaagcatcactcccttcttaatctaaaactagacttctaattgcacaaacacactctgttctgaaagactaaagcattgactctttgcctaccacccatctttctgagatctcccacaattgcatattcactaggaaaggtgcccctttctctcctctgtatgcaccccaggggcctggcttctgttcactcatgccctgatgtcacccataggcgggagacctttgattttgatgacgactgtgacagcctgacgtgggaagagaatgaagacacactgctgctatgggaggattttaccaactgtaacccaaccattgacctgcagggtgaggtgagcccatgacctgccttctctgggggtgcctctctcacaggatccctcattctttcctttgcatgcagcctttgatccccagctaaactatcccttctgtgcccccagcaagaagaaaacttgggcaacttgatccatgagaccgaatccttcttcaagacgagagacaaggagtaccaggagaccataggccagattgaggtaagcactcaagccaaggagcctgctatggggtctctcagggattgcatagttaagatcctgggtgctcatagaaatgcaggcttgcaaaatggggcaagtcagggtttgaagtcaaaagcctggcattgcaaacctgttctcattagggtattggtttcctaatctgtaaagtcaggcagtgattcctgcctcccctaaagaggctgaggcaggagagtgccaataacaggcttactcgatgcctagcatcatttggcatccctcagaagtcagccgtggtcatccttacttcctcctctgctagagggaccaggtacccatacaaaggaggaaatcatgtccaaacaggccaggtcacttgtccacagtttcccagttatgaggcaacattcacaccagtgtgcttggccactgctatacaagagttagtgctcttcctgtgttgaataagtccagagtcctccctcctccctctagctgtcacagtacaggctcagagacatgaacagtttccttttctggggaacaggcaagttctccagagatgctgagcacacggaagtccccggaatcagttggggcttagttggacaaacctctctggggttgctaagcaaccatacccactttgttcagaagcaagtctaaagaatattgactggtgtgcagagaataaggaaggttgatagcacaaggcaaagcctagatggcgccgccaccaagggatagaggagggaggttgctgcgggcagtaacctgaggtgagcggtccctcctcatcacctttattcgacaatgtctccttccagctggagctggccacagccaagagcgacatgaaccgacaccttcatgagtatatggaaatgtgcagcatgaagcgaggcctggacgtgcagatggagacctgccgtcggctcatcaaaggctctgcagacaggtgcggctgtgcgcatgcgcataggcatgcgccccagggcttccatggtgggtgggggctttacagagagacattcggggctgcctcgtgcagcttcactacattttaatttttccgaccctctgtctgacctcctatccatccacctccccccaagcccccatcacgagcatacctactatgtgctaggtgactaatgtatagacaaaacaaaacaaataataccaccaccatcacgatcgatcggttcaacagagagttgtcaaaggcccgctgtgtgctagagcgtctgagttagtgttctgttgctgtgatgaacactatgacggaaagcagttgggaaggaaagggcttacttggcttagacttccacatcgtagtccgttgttgagggaagtcagggaaggaagctggaaccaggaaatggtgcagaggtcatggagggcagctgtttaccattttgctttccatggcttgctcagcctgcttttgtatagcatcgaggaccacggaccacctgtccaggggtggcatcacccgcagcgggctgagatctgacgccaatcattaattacgactgaaggccagtctgatggaggccttttcttttctttcttttttcttttcttttctgtttttcgaggcaggatttctctgtatagccctgactgtcctggagctcactttgtagaccaggctggcctcagactcagaaatctgcctgcctctgcctcccaagtgctgggattaaaggcgtgcgccaccatgctcggtgggtggaggcgttttcttatctgaggttccttcttcccagttacctggggttttcagtgggcatcgctttgttacctggggttttcagagggcaccactttgtgctcagaccagggatgatggaaagttacagaatgaatacccacgaccaccccaccccccactcccaaagagaagccacacgctacagtaagcagtggctagggtagaggtcccaaggaatgccaagagccctaggcagcttatggaacctacagggactgggagaaagtgcgccttgcagggatctcacagcaggagcccctcagggtagccgccactgtgttgttgctgagagtggaacccagagccttgtgcatactaggcaaaagttttgctcaccccagacccttcgggtaggttttttaacaggtgtgaccggccagagctccgggccctgggccgttagggtcccccaggctgctctctgaaaggctttggtttctaatgcaggaattcaccgtcccccagctccgtggccagcagtgactcaggaagtacagacgaaatccaggaagacctggagcgggaggcggatgtggagcccatggtcagctgatgacggaggcccgacgctcctggtggtcttggtgatggggtccagcctcctctccccactgagccgtgtgggctccactcctcgacacagacttctgtcctcccttctccggaggcccagcgggaccgctgcttccttccttcctccaccaccgacccatggaatggtgctgtcgatttttctattgtccccacacacaccacaaacgcagacttttgtgcgtcgatgcagtgcaactgtgccttctcccttaagctgagccactttgagctccaaagaattcttcctagcaggtgtttttttaaatataaaactctaaggtgagggtggggcctggaggcgtggtagcttttggttttctccctcccacctgctcctctgattggacatgagctttgctccctccctctgtcccaagatgacttgcggtggtctgctttctcaaggaagtagactgtgttacctccagagctgggcgaggaggagtcgtcaatactttctcacccagggatagagtggtggacggaagtggagggagggaagaccaatttttttcttcttcttttggatctagtggcgatgtatcggggaaaggcactgtgggggaaggaagaacctcactgtgtttaaactatgcaaaaaacaaaaacaaaaaacaaacaaacaaaaaaacctaaaagcagcttgccttatatcattggggaaggcaggccctctctcagacttctgggaactgggagagaggccaaggttggcatgagtccctcatagcctctgaggttcagaggtggctttgggggtggtcccagtcagattgctggtaaggcctgcctgcattctgcaagccggcccactggactgatggttttcttggggacctctgtggggtggggtggggtgggtggtggtcttttattttcctgatgacttgatgttcattcccgcctctccaatcacctgccaggttccatggttgtaatttctctgtgagaaagtatgaacaggccaggcctgctacctactctgtcctccacagtaccgtcttggtcctccgttgtccctctggctggggggaaaaagccttgttgggggggggggagtggcatggctgctggcaggctggcaatgactggagagaagcctcaagtgaggaccgtcctcattcatacatgctttccatacccatctgtctggacgctgagccagtgattccccaaggctcccctggggcctgaggtaaggggccataagatagagcatccgtctatcagagagcagctggcgacttgcctagcaacaatcaggttttgtttttatttctttccttattttggggtccactctagtggttttgatggcctatgttgtttttattgacccagtgggttcctctggagttcaaaggaacaaaatgtccccagggatcagaacccatggccctctgaggcctgggtggtaaagggcagaggactctggaaccatagtggtacccgagcctcctctttatccctctgtttctctctaggtggttccattatctgttttgcacttagagccagtgtacatagtaggcttatgtatggatagagaggagagaggatgtgtttgttggtggcttgtaacttatcagaacttggtggcctttcttacgtgtgtcttccatgatgtggggaggggtttcccattggtccctgtgcaggtacttggagggacaattgtttgggaaaagacacagcccctgtcctcactattctcttcccctttctcaccaatccttcttttaaaggttacagggttcatacacttctggttattattattgtgtgttattgatattattgttttggttttattttattctatgttatttttttaaccaaaggttatcagagccagatgggcctggaccttagctgctgtaaagatttccgtttctgtgagggcaggaggagggttgccctcatgggtccttgactgaggttggggaccgtttccatccagcggtaaagcggtagagtctggtagtcaggtgggcagagcagaagccagcccttgatcgttcttcatggaggtggtgggctgacatgtatctctagcgttaagacaggaagcaacagcgtaaacgtttgaggggatggctgtgtacacagctactgtgtagttgctggtctctggtgttatttaactttcccacctgtatacataggtcatttgtctggtgtgcatgagaaaagcagactcctttgggttccctcctgctgactttcaaagtctgctttcccctgggaggtggagctctgaggcaggaggatgagtggagaggagcaagggtgtggtaggcatgtttcctggcttggtctgggctctgggcctggcctcctcttagtgtttggtttgttcgtttcgtagttcgttgccagtgggtcctgcttgtgctcactgtgagcccacagcttgcccagaaagaccccacccctcactggggccgcctctcactggggcagcgcctgccctgtctggacgaacttgtccacccgtgtaaacatgtacatatgttctcttgacttttctatgtctgagccccgtgtcatattgacacgggggggctcagggcttctcagatgggctccccgtgttgcccctggccatgctcctagtttgggggtcacatacacaggcacagcagggagacagcatcctttcaggttcctggttggtcgtgaaacacacacacacacacacacacacacacacacacacacacacacactccactaagactccaaaggagaaagatggggaagaggttttgtcttcccgttggcagtgtgtctggaaggcatgaacactttggactctgttttaggggtagaactcagatgtcctatgaagagtcaaaccactttgactttagggtgggaggagaggggatgggttaggggtaagatgaggtgtaacttaagctaaatgtattctatttatgaagcaagagactgtatttttatgaaaggaaaaggtttttaatctagggtaggcagtcatggtggcccagcattttgctgtggataagataccgccatgttcattgactccggtgtacaatcaacagtaaacccctctcctcagcttgccctccgtcctcactgaacgtccgcacacagctggggcgggagtttgttgtttcttcttccccggccctcagctccttagaagtcttggaagggagtggggagggagggtggaatgcagaaaactgaggtgggggagaggtaggttctaattagtcaccccatctcccttctggccagacctgctcccattcagctgtgtggggagagtaggagggaggttctgtggggttgggggacacaggacttcttaggggcatagggacttactatgtctgaagtcgtcaggcagctggagcaggcatagaagggactcaggacactaagagctcagccctgtctgtgtctactccaggccaaggtcgagcttggttgtggatgaaggaccaggactctgtagggtttcatcagacctgggtcctccctctgggactgacctagtgggaggagtggagacgggtctgggcaaagccatacacactctgggaaaagatttccaggctcagcgtggactgtgtgtgagtctcaggcaaactcctcaccttatgacttccttcccaagctctcgaggacatgtgaattccccaccatgacacgacccctttccacacactgtagcatctacctggtttttagtcccaccctacccaccgttgctgtgtctgtcagctgggtctgaaaatcaccgggaggggtttgtactcatcaaagactactgaccctaccagaaaaccaacctgtttactgtactgttgtaaatactgtgccctttatatcgtgtatattggcttctttggaataaagtaaaatgtcttagcacacatggtttatgctgctttgtatcctggtggttgtgggaggggtaagaagactaaagcaaacttattaaccaatcagtgataagattggggacttgcctatttgcatctcacagtaagatcttccaggatgccacgcattggtggctcacacctttaatcccagaactcagaaggtagatctctgtaagttcaaggtctacaaagtgagttgctggacagccagaaaccctgtcttgagaaaccaagtaacaacaaacaaacacacaccaacataaaaaacctcccagaaggacctaaggcagggagaattagacagaagaggccccaagaaaccctaggctaattggcactgcctggtctaaagttgaggtcccaccagctacaaagcccctatttcacagacctccccagaatgtctacaagaagcacctgctggactctggatttgatattgtccactgttacagttgcttttaacaaagggccacattcaaaggtggcctccctccactgtgagctgccatttccaaggatggagagaaactgctgcttggtcacatgatgtagctctttcctagtcccatctcctagagtgccttaaatggagtagttggcaggaaagggggaagaccagggtgacgggtgttcaaggtgcataacatcatcctatttaacagaagaggaaaccgaggtccacagagcctgcatgggatagtttttatgtcagcttgacagaagctggtggcatctgaaagaaggggacaaaaaattttaagaatatgcctccaaggctggagagatggctcagcagttaagagcacggtctgctcttccagaggtcctgagttcaaatctcagcaaccacatggtggctcacaaccatctataatggtttctgatgccctcttctggtgtatctgaagagaaacaagtattatacttacatataataaataagtaaatcttttctaaaaaaaagaaaaaggaaaaaaaaagaaaatgtctccaaaagatcagcctgtgggcaagcctgtagggcatttccttttctttctttttctgttttattaattagttaattaattattacattattgttagtattagtattattatcattttagttatttgagacaaggtttctctgtatagactggaactcactctgtagaccaggctagcctcaaactcagagatctgtctgcatctacctcctaagtgctagatgtaaaggtatgcactaccactgcacagctacttgggcaaaaaaaattcttaatttgtgattgatgtgggagggcccagcctattctaggtagtccaacccctggactggcggtccacctgtaaggctgagcaagccagtaagcagcgtccctccacggcttctgcatcagctcctgcctccaggttcctgcctcagtgatgagctgaaaatttgcacacgtaaacctttaactccccacttgctttttggtcatggtgttttgaggcgaatctgcccagtgtggtatcaaattagaaccagagggaccccaaagtaaatgccctggttacattgtcaaagacagagaaacacgttgaagcaggactgtggtggtgcaggcctttaatcccagcactctggaggcagacctgcgggtggatctctgtaaattcagggcctggtctatagagccagttccaggatagccaaggctacacagagaaaccctgtctgaaaaagtaaaaccaagccaaaaaaaaaaaattaaaaaaattaaacaaaaacaaaacccaaagagaataaagtaagaaaacccataccagtatcttaggaatacagtggttccctaaggcatcattctaagagcaggtttcggaagctgttttaatacgttcgagtattcatcaaacaacgtctcatgaagaaaactgaaaattttaaccacggggcagagggacagagggacagaggcaggaacaactggtttttgtggctagaggcttttaagaaaaggaagaaataaagaaaattaaaacgaagaacgttaagttcaggcccgctagggttttatctcattctgattccaatctggaaggaagcaagcccaggcttggccctgagccaggctgggagatggagggcagatcaggctccatgcacggtggcagcccccggggaggtggcagggagctggccttggtgtggctcggcgggcccgggcagagtggtagcctgcagatgtccagccttccagccaccaagtgttggggacccaagtagcacctgtcgcgtcgaccgggtcccccggccacttctactactgagcacgcgctctgtgcaggatctgtcattggctcctgcaactctccagcccagcctaagaaggctgcagcttgcctgtcctgctgattggcctggaggctttcatgcgagactctgattggtcaatgaggctcacgccctctctccttgggtcataccataaggagaggagacgaggagaagagagtatcatttcagggcttttctgctgcattctcttgacccgcagtccacagtagcaattttgatgttaaatacagctgatgtttattgacagagggggaagggtacccgaggaggggccccgaaggaggtggaccgggcgatgctgcgcctcccgcagaggtagtgcgctccgggcttgtctagtccagcccggtggggctgactctgagcttcccacagctgcgcaagactgttaagagtctccgcgatgctgccgctgccgtcgctccgccgatccctgctgtcccatgcctggaggggcgctgggtgagtgaacccctctgctgcctgagtcctgagagccgtggacagatcccactctgtgggtcctccaggttgcagccattatctccagggtccctatggctcccctaagtgcgcgccgggtcgcgacctgcagagccactctcccatggagaacctgtggcgccttaccaggtctctctagagcagtggttcttaacaaatgctgtgaccctttcctcttggtgtggtgactccccaaccgaaaaattatgccacttcataaccgtattttgctactgttataaatcgtcatgtaaatatctaatatgcagaatagctgatatgcgacccctgtgaaaggatcgctcggggtggcgacctacaggttgcaaaccaatgtcctagatggccagttttcctatccaaggaaccccagggagggtgtggcgtccggatttgtgcccacgcccccttcctacacccctctttctcctaacgctgtatatttcaaatttgctgattctcccagaccttggccggccctgtgttcccattctggagccttccgacactcccagggacctctccaccccactccctttttgttcaatattgggcttttgttttacggtgggtgccataatgacttttataacgtgtgatgcggctctgcgtggcatggggctcattttgaggtttgcctaaatccattcagacaagttccttaataaatcaccgggaggcagaggcaggcaggtcactgagtgcaaggccagcttgttctgcaagagcaggttcgaggagggtcagggatacacgagaaaccctgtctcaaaaacaaacaaacaaacaaacaaacaaacaaacgtaatgaagagacaggtaagccctagggcagagagctgcttgctttcagccagaatcctggctgccttagtgatgtgttccaatatcctgccccagtatggctcacggcctgtttgaacttgggtattattccccatttctgcctgccttccttgtacagtttacacagcacccccacacccctactttggttactgtttgcctgctctgtggcctgtgacccaccgtgtccacctccactgagttgtgacctctttgagttaatcagtgaccctttccctgctcccatgggatgacctgggtgagtttcaacccttcctcatgttgtgtgacgctattaggcaaaggacatgggattggggggtggggtgggaggtggggcgtgtggtgaatggagcctgcacctcttcagtttcttcctgctccgagaccacccactgcagccccgggatggaaggctcagataggcagagccttctatagattctcaggtttactttgtacctctccgggtgtcagtgtgctacaaggtgtactgcagtcaaggggatcatgcactgggtgggggcagtgcatgatcagggagtggaactcgggggagttttcaacttaactggccagagaggcgtggacccatgcatcttgtcttcttttaaggaaagcagtccatgttatgaagtagtttcgaatagcagtatcattttgctagctagctagtgtgagggccccacgctgagcctaggagcttgttctggggaggcagatgtagctgtagttacagttggtctggatccagatccccgcccttcagtgtgcggccccctaaactggtgggaagaggattttgcaaccagttctctggcctcctgctgcctggtttctgtacggtgcggctggcctggcagggcgccctgagaggtttcacaacatcagcgaaatacattcacctttggggcaggtctgcagaatgcttaggagagcttccagcctgtgcccgtggtcctggtggcttcttcaatcacgatgggaataatatctctggatagatgtcttctcctcagtggttgagaggcacaacccctaggacagttggggttatttatttagtccctcattctttttaagacttatttatttagttagttatggagaaaggatttctctatgcagctctggctgtcccaacctcatcttcctgcctctgggattaaagacatgagccatctccacaggccttgttttgttttgttttgagacagggtttctctgtgtagccctggctgtcctggaactccattcatagaccaggctggccttgaactcacagacctatctgcctctgcctcctgagtgctggaactaaaggcgtgcaccatcaaactcagcttcatcttctgttcttaatggatttggtggcctcacacttaactcctgctttgatggcaatttggggattacttagttcaagagaatgacttatcaaaggtaacaaaacgagttattccctgctacaacgtagcaaatgaaggctcatctctgccttgagctgatgcagcaagcataactctcttctcaaacacagacccgaaaactgaccctggtttctccactgctctgctctcctgtgtcgtttggggcaattttagtttcaccagttgtgaattctgaactctccccaagcaatgttagctctatcagcctgggcaacgtgggaccgcccaatcacagctcccctgggagggatgacttgataagaattggtgtgcgtgagttatatttgaactacagactcgggcgatgttttgtgaatctcttgatttccataactgagtctgtgagtggtgtgtgtgctcgcacgcgtacgtgcgtgcgtgcgtgtgtgcgtgcacgagccactgcacacagggaggtcagagatagataactttgggtgttggtcatccccttccaccttgtttgtgacccggtttcatatatttttgttgttgttagttacaaggtaggccaggtcagctggcccgtgcgtttcttgctgggtttgtacatgtgtgctgctgtacctagctttacatgggttctggggattcaaactcgggccctcctacttgtatgccaagcactttttcactgagctgtctccctggctctcagatatattcaattaaaaagttgatatttagccagagagatctcaggggttaagagcacttgcttgtagctcgtgtggaagacctaagttctaagctcttctgatctccacaggcattgcactcatgtgtgcacactccatatacagacacacacacacacttaattaaaaataaacttttttaaagaattaattttgtttttgttgggtagagttggcacaggccttaattccagcactcagaaggcagaagtgggagggtctctgtgagttcaagacaagcctgatctacagaatgagttccaggatagccagagcctatctcaaaaaaaaaaaaaaacaaaaaccctaaacaaacaaacaaacaaataattgattatgcactcagagccagcccagtgattgagcatttgtctggcatcaaaactacccacagctgacgtcatgtaaacgacacatgaaatacacctgcattctctctcttgggcgccatgcccaaggttatgtggatgcaaatctgaaaagaaatgaaatccagaaagaccgatggtcccaagggttgtgggtaaaagctacgtagctgaagtttcctctttgtaagctgtcctaccttactgaatgtccccaggacatggagctgtgactgacacctgctaatctctgggcagactgagtaactaagggagcttgccagctagcccttccttgttaggagacattttatcatcgaattaccttttggtagggggctggagagatggctccgtggttaagagcactgactgctcttccagaggtcctgagttcaaatcccagcaaccacatggtggcttataaccatctgtaatgggatcccatgccctcttctggtgtgtctgaagacagtgacagtgtactcacacac

SEQ ID NO: 558 - DNA, 2470 bp, Mus musculus
  misc_feature (1)...(2470): n = A,T,C or G
ncagtcgcggcgcaggcaccggaacccctcaccagccccacgcagaccaccgcgacctccagctcgtcccaccatctctcccgacgcagcggagccgcatctggcacctaacaccaccccggccgctctggagcccgcgcccgccctggcccggccgcgccgggagcccggccccgagctggagccgcatttggagccacgggcccggggccctgagccacgcagccggcgcatggttaactcgctgctgttcggagagatggccttggccttaggctgcccgccggggggcggcggctgcgcaggcggcggcgggggtggcggggccgggccggggccctcgcccgtaacggcggcgctgcgggacgatctgggttccaacatccacctcctcaaggggctcaacgtgcgtttccgctgcttcttggccaaggtgcacgagctggagcggcgcaaccggctcctggagaaacagctggagcagcagcagagcgagcgcgatcggcggctgcgctacaagaccttctcccgcgagcaggccgtgcagaccgggcccgagctgctgcggccgtcggctgcgggaagcgggcaggccctcggcgcggccaccggcgtcaacgccaacgcggtggccctgggcggcctgccccccggcggcggctcgcacccgcagcactacggtcgcctgcccgggaccatctggagctacacgcaggtgcggcgcacgggaggcggtggcgtggagactgtgcagggccccggcgtgtcgtgggtacacccggacggcgtaggcgtgcagatcgacaccatcacgccagagatccgcgctctctacaacgtgctggccaaggtgaagcgcgagcgtgacgagtacaaacggaggtgggaggaggaactggccaaacgcatgaaccttcagaccatggtggacacgctgcaggaggcggcgcaagaagccgaggctatccaggaggagatgaacgagaagattgagcggctcaaggccgagctggtggtgttcaaagggctcatgagtgacgcatcacgacctccctttacccgtcatgccaaacgcttcattcactcggagcccatgacagacctggacacaaagatccaagaaaaggctatgaaggtggacatggacatctgccgccgaatcgatatcacggctaagctgtgtgatgtcgcacagcagaggaactcagaagacgtgtccaagatcttccaggtggtccctaagaagaaagatcgtaaggtggcttcggatgaagacatctcggagcaggacggggaggtgaatcggttttcagatgaggaggtcggctccatgaacatcactgatgagatgaagcgcatgtttaaccagctgcgggagacctttgattttgatgacgactgtgacagcctgacgtgggaagagaatgaagacacactgctgctatgggaggattttaccaactgtaacccaaccattgacctgcagggtgagcaagaagaaaacttgggcaacttgatccatgagaccgaatccttcttcaagacgagagacaaggagtaccaggagaccataggccagattgagctggagctggccacagccaagagcgacatgaaccgacaccttcatgagtatatggaaatgtgcagcatgaagcgaggcctggacgtgcagatggagacctgccgtcggctcatcaaaggctctgcagacaggaattcaccgtcccccagctccgtggccagcagtgactcaggaagtacagacgaaatccaggaagacctggagcgggaggcggatgtggagcccatggtcagctgatgacggaggcccgacgctcctggtggtcttggtgatggggtccagcctcctctccccactgagccgtgtgggctccactcctcgacacagacttctgtcctcccttctccggaggcccagcgggaccgctgcttccttccttcctccaccaccgacccatggaatggtgctgtcgatttttctattgtccccacacacaccacaaacgcagacttttgtgcgtcgatgcagtgcaactgtgccttctcccttaagctgagccactttgagctccaaagaattcttcctagcaggtgtttttttaaatataaaactctaaggtgagggtggggcctggaggcgtggtagcttttggttttctccctcccacctgctcctctgattggacatgagctttgctccctccctctgtcccaagatgacttgcggtggtctgctttctcaaggaagtagactgtgttacctccagagctgggcgaggaggagtcgtcaatactttctcacccagggatagagtggtggacggaagtggagggagggaagaccaatttttttcttcttcttttggatctagtggcgatgtatcggggaaaggcactgtgggggaaggaagaacctcactgtgtttaaactatgcaaaaaacaaaa

SEQ ID NO: 559 - protein, 592 aa, Mus musculus
QSRRRHRNPSPAPRRPPRPPARPTISPDAAEPHLAPNTTPAALEPAPARPRREPGPELEPHLEPRRPEPRSRRMVNSLLFGEMALGCPPGGGGCAGGGGGGGAGPGPSPVTAALRDDLGSNIHLLKQVRFRCFLAKVHELERRNRLLEKQLEQQQSDRRLRYKTFSREQAVQTGPELLRPSAAGSGQALGAATGVNANAVGGLPPGGGSHPQHYGRLPGTIWSYTQVRRTGGGGVETVQGPGVSWVHPDGVGVQIDTITPEIRALYNVLAKVKRERDEYKRRWEEELAKRMNLQTMVDTLQEAAQEAEAIQEEMNEKIERLKAELVVFKGLMSDASRPPFTRHAKRFIHSEPMTDLDTKIQEKAMKVDMDICRRIDITAKLCDVAQQRNSEDVSKIFQVVPKKKDRKVASDEDISEQDGEVNRFSDEEVGSMNITDEMKRMFNQLRETFDFDDDCDSLTWEENEDTLLLWEDFTNCNPTIDLQGEQEENLGNLIHETESFFKTRDKEYQETIGQIELELATAKSDMNRHLHEYMEMCSMKRGLDVQMCRRLIKGSADRNSPSPSSVASSDSGSTDEIQEDLEREADVEPMVS

SEQ ID NO: 560 - DNA, 68732 bp, Homo sapiens
  misc_feature (1)...(68732): n = A,T,C or G
gtggggctgggatgagctcagccgcattcctccttttcatagcgttggacggggcagtcctccgggaagaaggccttttgactcaccctttcctttcagtcacctcccaggaggtgtctccattgctgcgacttctgtttcagcagaaataagatgatgaaacttcaggggacctgccctgcttcccttggagggttttccctgacacgtgagagagtcatttgtaaaccagcagtcagaggtgaggtaagtggggatttaccgggctcgccttcagcaagctggtggagaagacaggagggacccccagggcaaggatgcccttgtcctcctttgccctggggtttgtggaactcccagggtctccctggcaacaacccacttatcctggtcctgcattcagctgtggattcatccattgccctgaggctggtgtggacattgcagtctctaggcaggacctggcttactattttggacctatgatgtccaggccctggaatcttccctcggccagggagcttctcctctccaagcctcagcgtctccatgtgtaagatgggaatgatgggccttcctgaaattgatgaggttaggatggaatgaaatgatgcatgtgaagcctccatctgatgcctggcactcgatttgatgtctaggtgctccataaaccactgctgttagaactggtccgagcagggtgaggtgaggatgaatgagagatggtgtgtggagcaatgagaaggagctcaggggtgttggttcctgaggtcagggagtcatctctttggacagagatagatgcatcgattcacactgttgggcactttacagtgctttcccatgatgataagaatgaggcaggagaggccgtctctgctgagagagggctgcaggctctggagtggcctcagagagtcatcctgatgcagcacttgccctctgccaggcatccttccaaggacttggacagcatttcatttagccctcaccaaaaccctaaggggcagaggtgcctttcctattttatagatggggaaactgaggctgggagaggcctctggaagaagctgtcttgttaagcattgggctttaaattaattaggggctgggcactgtggctcatgcctgtaacccagcactttgggaggccgaggtgggcggatcacttgaggttagaagtacgagcccagcctggccaacatggcaaaaccccgtctccactaaaaatacaaaatttagctgggcagggtggtgcacacctgtagtcccagctgcttggaaggtgtgagaattgtttaaaccagggaggcggaggttgcagtgagccgagattgtgccactgccctccagcctgggcgacagagcgagtaagactgactcaaaaaaataaataaataaataaattagggcacatcaaagacaggggtactgtgtcctcagggcaggacttctggctgtagagagaagagtcagaaggtgagtgcttggggctggggccatagggtctggcttctccctccggaaggagctgtgagtcgggcagatagtgtccttccctccctcaatgagccctcccttcctgagatggggaagacagtgaactggtggaaatgctacagagaaatgaatgcttacaatggagaagaacaggaggtccctaccctgggttacggggtgtggggtggcttctaggaaaaagtgctgccctcaccttcaccagaaagtctaacataaaagggactgacttattaaatgttagctgggaggtggagcaatcagaaccctcatgcattgccggtggggaggtaaaattgcatggctacttgaaaatctgtttggcagtatttgccaatgttaaaaatgtgcgtcccctgtgacacagcaatcctgcccctggggcgagtcccaagacgaacaagtactgtgttcaccaaaagacatatatgagaaggttccagcttgactcctagtagccccaaactaagaaacagcccaaatcagcagtagaatggataaataaatggtgatgctcacaccatctaactttatgtagcagagaaaaagagcaaaacacaacacacaactaaatggatgaagcaaaacacaacacacaactaaatggatgaatctcatacacgtagggttgaacaaaagaagccaaaactagaccgtatgattccatttaatgaagcctagaaaggaatctggggaaagaaaagtcagcacctggttacctttgggaagtatcaactgagaaggagcatgaagggaccttctggtgtgtgggaaatgacctggtgagctcatcgggggtgcatatgtaggaattcatagagctctacgattagtatttgtgcactctacctatatacgcacctctatgcaaagtcaaaacaagacaacaaaagagaaggagaagggctcccaaagctaagttctggccaataagcaagggccagccagtgaggagggggatggtgtcttggaggagaagccagaaggtgcaaagacccaggggcccgagtgtgtggtgttgcttctctgcctggttccagggttgccgatggtgctcctgtccttctcttctctatgcccccttccactcatttggaggtttccactgacacagtgaactaggttgacagaagtcatttcaaaacacgctcctccagtccatgtttaatgttctacttttgagttgttgcgggaggagctacagtcagagcaggagaggggctggccttggaattcaaagctggattcaaagcttagctatgccatgaactgtgtgttcttggagaagccctttctcccctatgagcctcagtttccccatcagtaagaaggtcttcttaacatacagagttttagtgagagagttggctgcaggaggtgttcaacaggtgcccatcatatgggaatgagggaataaggtctgaaggcaagggccccatgccaggcccagggctccccctaaagtgattgagtgtggccctgataaggcctctgcaaaccccggcattgatcatctgtcacatagaacttaaaccaccacctcaaacagtgcctggcacataccagggattcaagaagcattgggttataatagctagtgcctaatatgtgccaggcattgctccaaatgtgtcatacctgtggacttctgttttgatcctcccagcagacctatggatgtctaccttcccgttttacagaggggaaactgaggcacagagcgtttgagtgacttgctcaaaatcactctgttaatatttgatggagcctggccctcgtcccctgtacctaaccacactaccacacggccagaacagatgaggccgcctaagctgcctctaccgggaggcctggagaaggtgccaaaggcaaccagggctcccccagggctactgaccaagatcagtgctgtcagggcagccagggggacactccaatgccctgactttggcaaaatccacgccctttttgaggaaggcaaacccacccagaataattgttgagccaacaagcagcttaagccgctcataagccctgaggtgcctgtgaaggctgaggcccagcaatgagctgccactgccaaaaccagtaagagtcactgtttttgccaagctttttttttttttttttttcttagctgttgtcattgttttttgggaggagagatgggacatctcaggaattcgcctgtgctgctgaattctcacgtgcagcctcatgtggactcacagccactccctatcctctgtaccatcatgttttactgttctctttaattccaccatgaagagacttgataggaatgttctggaaactgcagcctaggggtggggacgggggatgcgaggagtggggagcagtttattctccctggcagcaggactgaactttggtgccagagggccactgggtgtgagactgtgggagatgtttgtttttttcctgcctctttatacattttatgggctttccatatttgcttaagcaaaaaagttaaaaaatgacaatgataatagttaacatttattgagcattgctggcatcgattgagcatttatcgaacatactgactttccatgtatgaactcacttaacccttacaaccaccttttttttttttttttttggaggcagtctcactctgtcacccaggctggagtgcagtggcgagattatagctcattgcagactctacctcccaggcttacatgatcctcccacctcagcctcccaagtagctaggaccccataggcatgtgccaccatgctcagctaatttttaaaaaattttttttgtagagatggggtctcactacgttgcccaggctggactcgaactcctgggctcaagcgatcctcccacttcggcctcccaaagtcctgggattataggtgtgagccactgcaccaggtcagatattcttttttttagaccaggtctcactctcacccaggctggcctggagtgtagtggtgcaatcttggcctctgggggttcaagtgattcttgtgcctcagcctcctgagtagctgggactacaggcacatgccaccatgcccagctaatttttttgcatttttactagagacggtgttaagcctttggccaggctggtctcaaactcctggtctcaagtgatccactcgcttcggtctcccaaagtgttgggattacaggtgtgagccactgcacctggccccaggtcagatagtcctatagtcttatttccagatgaagaactgagtacagaaaaggaaaaattaaaactattgaaatttaaaaagagatcattaataaagaggaacaaactactgatacatgctaccacatggatgagcctcaaagacattgtgctcaatgaaagtggccagacacaagagatcacatattgtaaaatgtcatttatctgatatatgtagaaaaggcaactccatagagacagatcccagattagcggttgtctggggcagggggtaggagtggggatgatgaaatattctaaaactggtttatagcgttgtttgcacaacttggtaaatttattaaaaaccattgacatgggtgaattacataatatgtaaaatattcctcaataaagtaaaaaaaagaaatgcaattacgttctgcaaatataacatttcctaagcagccatgatccactttacaggaatttctccagtaactaacagctcattcatttgttcacctgaactcatcttcgttgagcacctattatgtgccaggtaccatgccaggatatgggttccagggtgaatctgatcaagtgcttctgctctaatagagaatatgggttagcaagtgttagaaggctgggctagaaggggtggagatgcagatgagaaatccagcaatgacaagagcgtatacttggggctgccacagggtgggcagtgctggcagagcctggaggaagcaccctccacccagacctggcaggtacttgagaaggttccgagaagagaagtttccgagaagagaaggttccgtgcttgaggctgggacctgaaggatgaggagttgttagcaggtgaaatggctggggagtggggcaggaagaataaaagtcattttctcattcatttcttaattcttttattcattcattcagcaactgttcattgagagcagttatgcccatttccctgatgaggaaatagagcctcagagaggtaaagtgacttagatacaaaccttagccaatctcttgtcttaaaagcccacctttttccactccccactcttgcctccaaaaacagtctggacaggttagacacaccgctgtgactttgagggtcaaggggaggtaccctgccaaaaaacaaaaacctaattatccttgtttagtgagaggaggctggcgtcccccacagggatgttcctttgtctgttggaactcttccgctgccttgaggacccacctttagccccctttggatcttgaatgggggagccagcctgccagtgtctggggttaaggggaggagaccactgaattcattgtctgggccagggaggacctaccattggaaagggaatgggaccagaattccagaccaggctttgataccaattattcaggagacctgggtcagtccttacctctctgtggtcctcagttttctggtccctgaaacaagaaatctgggctggctgtatcctgaactataggacttctggcctcagatgcctccagattgatatgggctggaagtagggtgacacatttgttctgatttgctcgttctgatttactttccaggttttagcatcaagagaaaccttctcagttcctgataaattgggatggttggtcaccctagctggaggactgttaggttaacctaacctcacattttacccacaaagagcaagacacgcagcacccgcctttattcctatgtggccacgaagctattttcaagccattttgtttgcacatatcatgtttctagggttcagctgaaaaccctctcaggtccagctaccacttccctcaattccttcagatcttctgggctctgcttggccatctccttttcccccctctgcaccccctcccatgcctcaggatggtcttttttggttgtctccatcagctcccctggagcccctttagctccttcctctgcatttaatgcaggatttgtgccgaagcaggtgctccacaagtcatcacggaaagtctgaatatctccagggcccagggcagggctgcccccaccctcaaggagggctgcacaccccaattccagggcaactttgttggaaggacagatccttcctggaagaggttgcagggagccactccccaggtgtgacttcttaaccctttctcttccatgggaccactcaggcattgggtggagcctgtggaccccttctgagaataatttttttaaaaaggcattaggattactatgaaaagtcattttactaaaaatagatatcaaactattaacaatttctcatatagtaacatacgttctcttttactaatacattaaataagatttagtggtcggtctaatatgactttaatttcacagttctcgtagcttagatgatatcttgagatgtttacaataactgtagtgtgttacgtaaatacctgtgatttctactagtgacaaaatcacagggacatctacttgctgcctacattcataatcaaaggatatgttaaaaaccattggctgggcacggtggcttacgtctgtaatcccagaacttcgggaggtcaaggtgggcggatcacctgaggttgggggttcaagaccagcctgaccaacatagagaaacccccatctctactaagaatacaaaaaaattagccgggtgtggtggcgcatgcctgtaatcccagctacttgggaggctgaggcaggataatctcttgaaccccggaggtggaggttgtgatgagccaagatcgcaccattgcactctagcctgggcaacaagagtgaaactctgtttcaaacaaacaaataaacaaacagacaacaaagcctttagagattagtgaggctaaaggtataacttttgtccacccctgtgtcatggaccccccagaattctatcctcagtcctcttgggggtccatgaacctctgcttcaaggcaaaggggttttgattccttaggttagataaacaagaacatcatcaagagacgagagaacgaagagtaaagggcagtgtccagactgggttgggttaagcagagaaaggtttctagatgagtgagtttcagagctgggtgtttaaggtgagtccgtgttggcaggaagcaaggaactgtggttgagggaaggaactatggggaaggtttgcttttgtggctaaatcaaaaacacagcagactaacatcacagccacatcactccagggcaagcccgtgtctcctttgtcaccaagaacaccaaggcattgtccatgtaagacagtgtgcctgtcctcaagcttacatacaaagagacaaaacaaacacaaaagttaataacaagacaaaaattaaactgctagtaaaaaatgcagtcggaagtatctgaaacatgccacatatctggttaagtgcatacaatgcaagccacaggcgttcaaaggtgggggttcaaggtgggggtcacctcccctctgaggtttgcggtgaggaccaaatgcggaaatggacacgaggcccgaggccagcattgtggaaggccggttagagcatgcactttggaccattgtggctacttaacgtctcagtgaccttctctgtaaaatggggataataaataagtatggcgcctgacatatactaatgtttgcaacacggttcaggagacaccagagactggagaacttggcctttaacgtggtaggtgtgaaaacatttgaatgaatgaatgaatgaatgaatgggtcctcgggttgcctcggtctgccccaggcggcccgctaagccccatgtctgtgaaatgaatccccagctctcggggtcagcttcatctcagcgtgtgggtgtgggtggtggggaggtgctgagcagctcagcagaggcgaggcccaggccgagtttgtgggtgtcatcccgggagggtcttgctcggcctccccaacccccatgctgctcggctcctcagtgggcgggggaaccagcgggcttagctgtgcccgggccgatctcgagaggacaaggcccgcagctagcattcgaggagcccacccccgggtccgcagcgtggggcacgggcgccctcttatccccgaaaggtcgatctgggcctccccaggctagagtgggggtggggtgccgatgcaccttcggatactgtggtcccccagcccttccagccgcggtcgcgcacatccgaaggaatttggggccaggggcattgcgggcagagaggacagagaaacggagccctctcggcaggcgacgtgggagaggagcgccctaaaaagtggaaagcgagcgttgccgaggctgctggcccctttaagaggcccggctggctctgcggcggttccagctaacccggtccctggtgcagctctgcggtccgggtcccccagcagagaatcggcacccggcggggaggcaggaccagacgcaggagagggcgtggccccgccggggagctgggcggagtctatgctgcggagaaagcgggagaacccggaggtgggcggagccgagggtctgtgggtggggcccggcgctgcgggcctcgtggggcggagcctcgggctcggggaacgccgcagagggaggaggggtgggcggggccgcggcgggggcggggccagtgtctgcagtgggcggggcccgccgcagaaggggcagtgccggccgagagtcctctgcgtgcggctgccgcggcccctccacagcgtctctgacagcccgggcggtgagacccgcgacccttctggccccgcgcagataccgcggcctccaccgcgtcccgaggagcggccgagtgccctttctcgcctcggcgcccgcatccggggccatccgtcctgccgtctctgcggaggccgcatctggcgcgcatctggaaccgcccggccggccgcgctggagcccgcgcccaccctggcccggccgcgccgggagccctgcccggagctggagccgcacctggagccgcgggcccggggccctgagccgcgcagccggcgcatggtgaactcgctgctgttcggggagatggccttggccttcggctgcccgccgggcggcggcggcgggggctgccctggcgggggcggcggcggcggcggggcagggccgggtccgtcgccggtgacggcggcgctgcgggacgacctgggctccaacatccactcttgaaggggctcaacgtgcgcttccgctgcttcctggctaaggtgcacaagctggagcggcgcagggtaccgagccgaattcgtaatacagtgatannnnnnnnnnnnnnnnnnnncagcagtggcgcggcggccggcgccaacgccaatgccgtggccctgggcggcctgccccccggcggcggctcgcacccgcagcactacggccgcctgcccgggaccatctggagctacacgcaggtgcggcgcacgggcggcggcggcgtggagaccgtgcagggccccggcgtgtcgtgggtgcaccccgacggcgtgggcgtgcagatcgacaccatcacgccggagatccgcgcgctctacaacgtgctggccaaggtgaagcgcgagcgcgacgagtataagcggaggtgagtggccgcccctcccccgccgccctgggacggggcgcccaggtccaggctgccgcggaatgcgtatgcgggacgggggccgggcgggcagctggtactggcaggtgggctggaagctgtgtttgcagagcgtcttacgtacgccaggaaggcccagttatctagatcccaggatgggggcgggcgctggctaccgtgggggccacctcgatgctgtcactggtgaggcacattgttttctaggtgacataataactgtctgtgttttatgcgatctcatttaattctcagcacaatacagcgtattgtgtaaggcagtcttatcctcatctcgcagatgaggaaaccgaggtgcagaaatgctaagtgatttgcctaaggtggcttggcgagtaagtggtgaaaccgggatttcaaccagagattttaaccactcctggctagtctgtctcctagcataagtatttttaccaaggaagtaggaaatatgctcccctccctcaacatatgaaaagaaaaactctaaccaacccactgcctttttatttcttgaattaaatgagatcacgtttttgaaaatggatggatctgcccctaccccctggggccagtgtctgccgtcttgctccagctctgtaaggtccagcttgctgggttggataaccacaactacaacagactgctcacaagcttttataaaatgcctcctttcatccctcttctccccactccctgagtctcatggtttattgagccctaacaaactcagccttaaaagcccccaggagaagataatgttgggctggagactggacattgaatggactgagaccacaatctctggctagaactggggtccagactctgcaagactggccagtgcattcctgcctagcccagattccccagctgggaaactgtcattgcttcctgtctgcagtctggccgacaatactgtctgcttggctttccgataagaggagaggggtctcctatcctcctcctcttcccataagagaagaagggtctgtctttggcatctcaggcctggctggggaaggggccctctggccctggcaatcgctgttccaggcacaggcagccttccattcggagctattggctctgaactccagggcttggaggatgtactgagaaggacccttccttccatctctaaaggtctgtccagggagctgggcataggtctccttccgtattctcccattggacaggctagcaactgggtaggattcaaatgccagccttatacctgctggtgagattatcaaatcacttgaaagcctgtttgctcatcagagaaatgggaataataaaatctgcccacagttgctcgaggagacagcaggatggtgatgctctttgggaggtataaagtaatcatgctggtgttattaaagatgataggcactttgtcaagctagcagggagtagaaatgctgagagtcctcaagctctctcatgtggcgcctagcttcctgggggtaggtcttacactccactgggagacgggcttctctcctgggttacctgtttctctggaggacttgagaatggcccgcctggtgccttgccacagggaggccacctcgccgcccctcatggtcaatgtcattggggcaggctagggaagcaggcacttgctctcaatggtgaaactggggagggatgggccgggccctcctgtctgccactgttgattgtgttgtcatgcctcaggcttgtgttgtgtttgttttattgtgtgtgtgcttcttggacctggctactaaggtgatggaaaaaccgtgcccagtcttggagggagatgggttggcattgagcaacgatctattcaagttgcacccagggcgtggggtgtgatgtcagcttctggcgctggcctggaatgagacggtgctgctgagacaggtggagtgcgggcgtctctcttcccgcccttctgggatgcgtgcacaccttgtcttccatttattttctgaagttaactcaagactcatgttggatttttccaaagcaggtatattcctttcctggggcctcagtttccccgtctgtgaagtgaggttgagggggggctagaattgcggtccttgaaaccccaggctttcttagagatgctttagggtttccttgaatatctaataaaaatgatcatttaaaagaacattaagacgttaatacagtgataaaaatgtgctcacccacctttaagttcttaatattaactcactgggttctactaacatgctaacttgttagtagtatgttttgggtatccctaagaattttctttggggaggagggcagacatttgataaacattttttaaaaagttgaaaaaccactgggctagatgatctcaaagggtcttcccagccttggcaatatataaatctgagtttgagctcccagcccgcttctgatcccctggccataagagaagtcaccgtctaagggatgagacccaggtgtctgcctggactgttgtggccatgaagggctttaaatcatcccaggatatctattacagaactccaagcaatgatgcccagaaggagcctaacccagaagggaaaggttccagggtttcccctggtccacctggaggaagctgcagctccagagacccccacttgcttccccaaaggacaacttaggctgcgaggctcagcgatcttcaagccggacgcttgttgagttccacctccatgatttctggccacatccatgtactaccgcctgtgctattacgtacataaaatattttaacaacttcattgaggtacaacttgcatatcacaaaaactgcccattttaagtgtacaagtcaagatgagtaaattcacagagttgtgcagtcattaccacaatcccgttttagggcattgcatcagcccccaaaaagatccttcatgtccatttacagaaaattccaattccaagcccagcccaggtaatcactgacctgctctgtctctagaaactagccttttccggacatttcatagaaatagaatcatacactctgcagtcttttgtgtttggcttttttcacttagagaattttttttgaagttcatccatgtcgtagcatgtatttgtaggctgttcctttttatagctaaaaatattcctctgtagtatagaccatattgtgtttatgaatccacccaggtattcaatgtattttaaatttaaaacgtcaactgtataccaccgagcatcatctcatgtgccatcagtggtccacaaactgtgctttggaaacaccaacccaaaccagagcccctggcctggggtgcctgggtcctggccccagtcaccactgctttggttttcccttggcccaaccaggtctttaccacgtgggaaatgtggtcgctgaagccgcaatgaggacgaggttgtcaagcgttgatttggaaaccaaaacaaacatctctactctgtcaccacccagggccactaaaatatcttgttctgactttgcaagctgggggcttttccctggagtttcccactgagtttatctgaactcaacagtggagagttccctgagttggcatccaggagacctggactttaggtccagctctgccactaggtgctgtgtgacctctggccaaccgctgccctctctgggcctcagctcctccacctttacatgcaggagttcctgtgggtgatctctctcagcttgctctctactttaggtcagtgactccaagaggcccgtgttgtggctgatctttctgcctctggagaccacactgtgttcgctgaagcctttctctgttctgggcttccccttccctctcctatctctgccccagataactagggtccaggctccaggcataggcagcgctggccatcccatccccaggcttaaccggttcaaccgtttcccctgtcttcattggctccaaggaaggatgcaggaaatctttaaggctgtcaagaaaaaggtccctccagcctggcagctgtcacaaagttgccatggactggtaggggaagttgccctgggctggtagaggaagttgcccggcgctagtagtgctggcctagctgcctatcagacagggcgactcttttgggggcctggtgtccctgtccagaagcctgtccagccatcctggccccctcaggcctagtgtgatttgcagctggctggcctggttccctcccgtgcgagtggctgactgtatgcgccccccagttgaagtcagcctggaggctaggtttctttttttcctggtgcctggggtgattggagggtggtttgggagcctggagagaccactgtgatcattcagcctggtggctttcaggtgggctttttagagccctggagtccatagcagggcgccttgggagactcgggggacagtgggaggctgagtacctgagatttgacccatgttgcccaccatagctccatgcctctctgactcccagactgtccaaaaagtattccattttaaaaagggttctgctgttttaaaaagaaagaaaccgctgattcagctgagtactttcattttaaaggtggggaaaccaaggcccagaggggggctggccctcagtgctgagctggacagaccttccatctgccgtgcagagctggcctccccgcctcgacatgatgcccgcatcatccgccagcagtcgaggctttgttatgttctttccacctttttgtgtgtctgttttaaacatttttttaaaaagccactttctgggatgggagggacttttgtcacagctatttctgactgtgagccggaaggggctgggctgtcggccggaatggaggactccaaaaagggatggtgggtgggtcagctggagtgtcccccgcccattcccgtcacaccccaggggggccctcaagcaggtgggtgctggcccctgaatgtcccgaagcccgaaggctgccctggaatagaaagctgagggctttgttccctgccactcccattgacactttcgttatttctgaagctggcaccgatacggattctttatttctgattttccagtgaggcagccttcgatggtggaaaagggttttgcatcctggctctgccactgtctgtgtgaacatgggcaagtggcttggcctctctgagctgcccgtggagctccccgcttcgtcctctgtaaaagagggatcatcttgttgctctcccagggtttgagaaggaacaaatgaggtctggtgttaaggtacctggggcttggcagattttgggcatacctacctccaccccagcccagcccccttcccctggcaaagtctgttcctttaatttacaaggatttctcagcatggccctgactgcctaacaagtccatttcagggcatgtcgccgctctctctgtcccatggaggcgccagagatggtgttgggggtggagggagaacggctgcttctttgtccggcatctaagaaggctgtttgacctactcttagcagttgatttgtgcctccggaaatctctcgccatcccccagccctttctcccaacttcctttaagagaaacacacaaacccctccatctagcgcctcgggtcccttgagaactatattacagaatcccttggctgggttggcattctcactggggacaaatttgggagcgattctcagagcctcaagctagagggaggggaatgaggtcccagaaaagaaaaggaagcagggagacagctgacgctgaagattccttctcagaggaatgcgaggcagggctttgccttggcaaacgagaccggatgcgggtccctgggtcccccttccccccacgtgtatgcacactcacactcacacacatgtacgtgcacacacacacattcacatacacatgcagatgcacacaccagactctccgttcagtcctgtggcccacgtccccacacatgaccgtgtttgaaggacacagaagggtagacccggaatttgaacacgccctttgctgcaacgagatgcgttgccttccaggagaattgatttaaactgtgccatgtgtcagtgacaccggaggctgtgggctttgcatttgcagtcctggcttttgatcgtattgagaggtgaaggccggctggcattccatttatttcctatgtcgcggatggctgaaggcccgggacgggaaggaggcagccctgtcatgtccctgtgctcaggattagggatgtgttgctttttcctgactttctgctgtcaggcggtcctaagcacccaccacctcccgatcacagccccccacacccggagttgtaactacctggcatgtgtctgcccctgcatcgactggaagctctgtgggggcctgctccaactctggcttcgtctcccactggcagatcccagccaggacctggccaaggtccatgctgagtaaatactcatgcagcagggaggcctctgtgtctggctgctgtgagctagtaggcctccaggaggatgggacagaagacggacaacacagaccacgtccagggattcggctgtttgtggaggggagggcctgcacttggaatcagaaggcctgggccaaagttcaaagtttgaatgaacccccaagcctggcagtgcggggtgctggggccccagggcaggagttaaaagccgagtgagcttgggctagtcactgcctctcgagcctcagtttcttcatctgtaaaacagggatgctaagctctgtgtccggaggttgtggaagaagtagacaggctcgcctagctacagcacagggcgtgtaaacagtcaagttcagaatgatttcacagggcagagagtgggtgccctacagaggcggatctgtgctggccctgtggggtgggcagaggttgagaaccaagctggaaactgggagagggtgtcccgtgccctttgctggcagcatctgtgggttgcacagccctttgagcattgccagactgtgaggtgtttagaaaattccaggccagatgggagactgctgaaggtttgtgatgttgccgccgcctgcccacgaggggagtgtcctcccacccacactgggcaccgggtgcttggcttcctgagcaggatgtggtttctcattctagacctggtacaagagagggtagttttcacccaacagtaaacctggcaaatggcaatgcctggttctctggagggtccgtggagcccaggtcctggtctgggtttgcctgcgatgtggtctgagcttcactgtgcccacctgggaatggggacagtgggaaggtgggcttgcccagcaaccctgtgaagactacgttctctctgtaatgtagcacaactctgtgcatgccatttaatctcttgcacctcagtttgtcgctctgtaaaatgggggtgtggtttcttacgagttctgcttcccagggttgaggtaaaagtcaattaaaacagtgcagtaggaaaacattttgcaaaaggatttgaaaataaatcaatatggcttaatgcttccgtttattgagcacctactttgtgctaggtgcagtgatgacttctttaaatatgtgataattatgggagcagtcccaagcagtgggaagtgattatgctcattttacaaatgagaggttcagagaggtgaagacttctgtcccagatctcgccacgagtccgtctgggtctctggaccccaaggtcagtgctcctcccaggaggtggccttgtcccatgcccctggaggttgccaaaggctggctcagggtgaggaggcaggcaggaggcacggggtctccccagcacctgtcacaatattgccatggcgggtggcagaataggaggcggctgctgcgctgggaagactccctgctgtcactttacagaaattatttcttgagaagcaaatgaatcactggcagtagcaggcagatgaggctcccgggccactgtagcaggcctgtccaggcccctgctctttggagaaggtctcaatgggggctggcagggctggcaggggaggagttggggaacagggaacacatattatgacccgtctggtgatttccacgcggtctcatttaaacccggtggtggcactgcaggatggaaaccgaggctcagagaggagaagtaacttggaagtcaggctccagatccaacctttatcctgtgctgtacccagaaagggccatgcccattgcaagccgctttcctgctgtgagcctcagttttcatttctgtgaaatgttgcctagcaaagctggggcaggctgtggatctcaggctctcaattaatgctccatttatcttgcccggcccctgagtgtcctcagggcacagccagcccgaggttctcatccacggatcaccagcagcagagggcctcgggcattctggtggctgtttgggagctcgcctccgccctgggctggagtatccctagcttttgctttcagtcagtgctgtgaactttgccagggaacagggaagttgttacaatcgtttggtgcctcttgttggggaagatgagactgctgggtgtggatgtctgagaagccaaagtggtggtggtttcagaacagtggctgagtacccaccgtgggccaggcccctgccctcgagaactcagaatctggggacatagacaaatgtgtcatgccatgtggcagcatcatgtgacaacagcatgtgcccagtaccttctccaacagtgcttgcggatagtaggaacacaataaacatgtgttagttaatgaatttcattaaatatttatacaacatttactctttgccaggcttcattcaaagtggtttgcaaacatttaattcatggaagctgtaataaccctgtgagttgggtgctatcattagcccattttagagatgctaaaactgagccacagaggcaggggagggaactgggccaagacaccttgaaagtggcaagcccaggcccggtgcggtagctcatgcctgtaatcccagcactttaggaggccgaggcgggtagatcatgaggtcaggagttcaagaccagcctggccaagatggtgaaaccctgtctctacaaaaaaaatacaaaaaaattagccgggcatggtggcaggcacctgtaatcccagctactcaggaagctgaggcaggagaatggcttgaacttggagggcggaggttgcagtgaaccgagatctcgccactgcactccagcctgggcaacagagtgagcctccatctcaaaaaaaaaaaaaaaaaaaaaaagaaagtggcaagcccagatctgaccgcaggaagtcaggttccagttccaaccttaaacctgtgtagtaccagaaagggccgtgcccattgcaagtagcttccctgcttgagcctcagttttcacttctatgaaatggaagtaataaatctgacctcatgaggctgtttggagggctgtctaaaatgatacccgtggagcactttgtaaactggcaagcggagtgcctgtggggaccaaatccttgggagccctgagctctacccacactgcggtttcttttccaacttcccatgcaggctgaagctccttgaagctccatgcaatgccttgtcctctcttgcctttacattcacacctcccctagatcctgggacgggaggttggacagaaacctgctatgttagacagcttagagcagaacgtttgtgtggaacccaaaagctgggaagagaggaacctgcagggtttatttctgctgcctgtcagctctgagaccttgggagagtcactgtgcctctctgagcctccgtttcttatctggaaatgggaatggtcatgttgcgtggatggcaagtgcgatgatggtgctccgattctggctgctgtggcaaaaatcactaaataaggctgggggttctggggagaggagctgggcaggaatcgaatggcgtttgggccttggccctggcagaagcccctccatgtggctgtgctgggggtggggcctgtctctgagctgtctctgagatgcttgctcagcgccctctggcctgcgtgctccgactctgggatgtgtgttcacacagaccctgctcatctgctgctcgatggagagaggcccctgcagcggagacagcgccttccgccctcttaattggctatctttattacttgagttatttaagacggttcttggctcactgccgcctgtttgctgtcttgggggaggggaagagctactggtctaagtagatcttgtgaagttccccagcagacaggctcctctctgtatagggtcagcccatcttcccagggcccgttggcacccccgttttgctcctggcccactgtggcaataggcagaaggccatcttggggggtggtagtggaagatttagggaaagcttgttgcaaagtcacgaccagagagtctcggaggtctgggtgggacactggtgagaccctagggtgcccaaaacccagggattctggaaggtacccaagccagttcagggccagtcaagaaaggtttcctggaggtgacatcacctaggttgtatctggaaggttcagtaagagtggaagagaaggagagagggtgttccagatagagaggacagcgtgtacaagggcctggagttgagctgctgtgcagaacagtgtggagctgctcctggtgcccgggcttgagcctggcactgccagaacttggcctgtcctgtgcttgcttctgccctgtcttgtcccctcctccctcctcatgctcttcttggctctcattttctgtcttgctctcctttcctctccctctttcctttctttcttgttttgatctctactctttatggctggctgtctcactcccatcctgcttggggcagggctctgagggacatcctgtcccccatccctcagccagatgctgggccctggtgagtggctcttactgctggggccttgtgagcccatgagtgtgcatgtatgtacgtgtgtgtgtgtatacacgcatgtgagcacaggtctggagcctctggatttggagcccttaaggtcattgccctgcctgtggcgggccctgcagaccccttgtactatggggctgggggtagggtcttgacatcatggtggggggcaagggaggctgcctagtgagagagaagctgctggtttggagctcaatgctggccactggagaccctcagcctccccatcccccattatggtccagggcctaggattagacacaggtcaggaattggggctggggggaggcttggctgctccccttacctctccccgccccggcccccgatcgccctggctgtcccttctccctcacacctatgacttcctctcatcccctggatgccccagaggacttgaggtacccttcaagctcatctcatccatcctcctgcttccaggcaaaatcattccctgacatcccaaccaagttagctatgccttctgtctttcaaagcgaccttcagccattctgtagtggtttctatttctctctcacccctatttgcatattcacgaccattttatagatgagaaaactgaggcccagcgaaggagagcagctaccttgaggtcacgcaacagagcaggggccggaacccaggtattttcaccctgtcccctccacaggactccccttaaacccttgagctcagggctccctctgggggctgctggcactttcaggaggggtttggaaaactcccagaggacagagcacttggagcagagaagcaactgccaaaggcatgactcggagcctgtacagtggggtccgcagagacagggccctgctccttgaccagacatctgggtccctggcgctgtggatgaagctccctccacctacaaaagagacatctgaggttgcccgtggggtttgtctccatgtcgcaaaaggcacttctccagcctctggcctggttttgaggtcttgggatgctgacactgatctgccttcccgatctgccagccctgtgcttggctgcaccatttctctgtgcctcgttttccttttgtatgggatgggatgggatgatgatacccacagggtgttggtgagcctgattcaggaaaggctgccctgtctccttatctctgggttaagccctggagctggaagtcttgagaactttgcctagaatgttggagttgggtgaaccgtagaggctgatctttcattccccataaagaccatgtttccagggctccttgtctgggcatgtggcctgacaaatagtactttgggatttgcacatgtttttatatggaaagacattttttttaagacagggtcttgctctgttgccctgcctggagtgctgttgaatagtcactgcttgctgcatccttcaactccttaggcacaagcaatcctcctgcctcagcctcccgaggagctaggacttcagacacacaccactacacccagctaatttttttttaaaaaaaataatttttgttgagataggggtctcgctatgttgccggggctggtcttgaactcctggcctcaagtgatcctcctgccttggcctcccaaagtactgggcttacagatgtgagccaccatggctggctgagtcttaatattacattgctgttggtttcacacttacctttaaataaaatattagcatttaaaacatcaggacttaaatttgccgggtgtggtggcacgagcctgtaatcccagctacttgggaggcagaggcaggagaatggcttgaacccgcaaggtggaggttgcagtgagccaagatcttgccactgcactccagcctaggcgacagaatgagactccatctcaaaaaaaaaaaaaaaagaaataatataaaataaaacatcaggacttatctgacttggagactgatggcctgaactcagcaagctactgctggcagagccagaattaacctgatgccaagttgagggacctccaacttgtaggttattccttttctgagccctaagacataattcaattgtggggaattaaaaagaaattgcttcatttgctcttgcttcatgtttcctgttggcccgtgatttgggccttctcttgggtgggaactctggctctgaggtgacactgcttggagttgtgttactgctctgagcctcagttctctcatctgtaaaatggggatgacaatcttagctgatgaggttgcgaggatttgatgttgcctgcagagtgctacgtgtgctgctggcccctcagctgttaccgctccctccctcctgccctggcctggctcccaccagcccccaggccccaatttgtacacataaaaatgtgaacaaatgccaaagtactatttgtcaggccacatccccagacaaggagctctggaaacatagtctttgtgggggaatgaaggatcagcctctatggttcacccaactccaacattctaggcaaagttctcaagccttccagctccagggcttaccccggagataaggagacagggcagcctttcctgggtcaggctcaccaacaccctgtggttctcatcatcccatcccatctcatacaaaaggaaaacgcggcacagtgagaactgcctgctccctcccgctttggctgaagactggccttttgtgttctgagcacttcctctccccggtagagccgcctgggcagccaggaggaggtcatgtcccctctcttctcgagcagactgtcagcacagggtgactgggaaggcaagacctggcattcaaggctgtgtccagtgcagggtgtcacctggagcctgtggctcctaggagggcctgatggaatgtggacatgaatgggggaatctttccctgtccccgcctccctggggatcatggactgtctcagcctccccgttgtgtggatttggaagcagcctcagggggtcacattgctggtctgaggtctcactatgaggtagggccaggatcaggattcgaacctgcctcttgcagactgttacccaaagtactctctgccacacatgcaagctcattctggcaggctgagataggggaattggaagacaggggttcaagccctgccctgcacccagcagcagcaaggcagccgttcctccttctgggcccctgtaggcgatgggtagatggtttctgtgttttcatagactgccttgcgaggccttgtgggtgaagggcccaatcccagaccttggcagaggagtgacgttgaaggctggcttggcattgtttttccagagttgacgtcagggcagctggtttagggtttcatctgtgagacaaaggctgctttgtagcttctgcccggtttaagtccaagcacatcaccccccaaggtgggaaacgaggtggaagggattgcagggcccaaacagagaagccttgggaggcttggcttgcgctcagcccctccaagaagggagccaagatctcataattctatcgccatcttgctcacttcccgagagcactctgtatgcccactgcagtgtttgaagccgcacacatgtgttctctggaacatcgcaccactccagcaaggtggctgtgggtatgtccattgtacagatgagaaaactttgagtcgtgccaggtgaaatgacttgttccttgtcaaagctagagagtggcagagtgggcatgtgacctcaggtctctttggcttccaagatcaccactgggttccaccactagagtctcgtgttgcacccagctttggaaagggaattctaaaagccaagataccctggaatcagactggagcagataaacctcatggcttttgggggggacttggagctttctcttgtcaggattcagagttgggtcactgctttgagcacgtgttgcgtatttgtatctgcatgtttaggtatttgcacgtgtacgtacaagttaaagaagggatttggatactggagggtctgtatcactggcaagtgattccagggaggccttgtgggcaggtgtaaagagtcatcccaggggacacctaggaccttctgctcttctttgccaggattaccctacttgatcatttattcttccatccgtctgtccgtccgtctgtccatccatccatccatccatccatccatccatccatccatccatccgtttgtccatcagtctgtccatccatccatccttttctgggccacggtgctcagtccctatgcttgggctttggggatgatgctgcatgaactgggagcttgcagaatctggggagcttgccaaggaactgttaaatcagggctggaagagtccttagagattggttagatattttctctcccttttgtcagagaggggcagtgacttgcccaaagttgcacggggcgagtggcggagctagggctcaaagtcaggtctgtaggtcccagccccaagtttctgcttctctgctgtgtcaacagacagctctcactcctggccggcagctcccttacctagctcttcctcctctgctgttttcatgggttcttggcttttcgggagttgctggcagcctctgttctgagagacttctagaggtgtctactgaaccagcatgcaggccccagactggggccaagcttggctatgctctgccctgagatgacaccctcccgcatctggaacagcaggttggctgagcccctgaggggagagactccaaggccctgtttactttaccctactggacactggcttcttttcctccaagggtctccagaggtcatctgtttcttcctcatcttggggctaggaccactgcaaatcctgcctgaagatcttactgcctaggaagcacattccagaaccctttctgagacgggccgtccagtgtccttgtggccttttccattgggaagtgcttcctggtgtctaaccatgatccctactgcttcatttccccctttgtttagcctttcacagaggaggaaagtggttggatatcaattgcctggtggttctcaaggcagcaccattaccttgctgcgtaccctcttcccacctacaatctcccttttctccacttcctgagagactgtgccttgactcagatacaagttgagacacaatcttcatgcagaaaagatctggctggtccctgtagtatcccacaagtttctgggagggaggcacattccttttctaggagtcagggagccctctgagctagaagtggcctgaatcccagggatcactctggtcccatctttcctgatggggaaactgaggcccagagaggttgagcaacatgtccacagccattcagccagcctgtccgagttgggtgtcctccttcatgtggcaatgctgtttctatggtttgggcagggggcttgataaaggtggccggtggcctctggcctggtggtccctgccgcagacagatgtcctggaagcagaacagccagccccatgtggccccagagggctccctggcctggaatcagtgctcctgcctgctggttccctgggttggcagattcctggcggtcctgggctgccctcagggccaagcagtggcatcttctccgctcccacccaccctgtggcttcctctctcccacagcctcccagcctcccttttggccctagaggtgccagggaggcccctcacctccaaggggagaggacaggaggcctgagtgtacaccagtaattaagttgccagggggacactagctcctgtggctggggcaagaaggggttaagcagtgttgcctgccagggctggactcccagctggtgtcccggcccctggggccaaccaggccatctggcctgacagataccacactgtgtcccatctgtcccaaggcaaaatcaccaggaggagactgcctactgcctttgagggcctgcaggggtgggcgtggcccctgctgtctgtccctgggggggccaggccagttgggaggggctccccactgggcaggctgtcctctggccaccctccctgcagggtctccctaggtgtgaggtgggggagtctcagtccctggtgtggtcggagcttccttgtgcagaaggtctagagaggtgcagggatgggctcaaggccacacagtaagtcagcacaggcagagctgggcttcccccgaggcctgctggtggttacgcccagtggctccagctcacaagctcattcatccagtcagtagcggttgagggcctacggtgtgctgggcacttggtcactctggataccagacagttccccagtcccagcatgggagagggaacccagagacagagcctctaaggggaagcatggtgcagctcagccaagcccggggccctggacgctgtagcagccctcccagtagcctccctcccagccttcccagcagctggaggtggggcttgctcactaggaggagcaaaataatgttaggcactggtgtttatgatcttatggggtcttcaccatccagggaggtgtaggtactattgttattcccattttacagatgaggaaactgaggctcagagaggtaaagtcgctttagcagatcaccagctgcggagcggctgagttggacgcccatcccagctctgcctgacgtcaaagtgttttgggataagggacagggggtggctgcaagtggcctcccactttgccccaagccggcttcttctcgccatgctggcctggaccatctcctttttggctttttgctgagtccgggctgggaatcctgtggctggaggcccaaatctcagggggaagagagcccccgctgggttggagttgagaagagaggctgtgctggtgccggttcttttgcatagctggggctagtgaccctctgcatcccatgtgtggggtgctcggcagcatctgggcagcgcttgagggattcccctcggaggaccctccatccatctgagagccccaaggctctgccctccagtggcggctgggccaggccgttgggagcctccataatgctgttatgattatgtgaccctggatgagtcactgcaccttggtgagcctcactttccccatcagcagaatgagggtgaggagatgacaagctccaataaagatgccctccgaggggctttgcagtcatggaagggtccctgggaggctttgctccatttcattccccgtctcatcttaaggggactgacttctctctccagccccatgggtagttgggaggaacactcttgtttgtgtgttgtggggttgcctggtgctcagcctccacactccccagtggttcacatcaggtggaatgccagggcccgccatgatgacaggagcctgggattaagtaatgagtccatccccttgagctgtatttagtcactaattcttttggtgcgcgtgtttgcagtctaattacctgcctcagctgcgctggaacctgccccttcccagctagtgaggaccatgacggctctgcacagacaggtgaccgttgccctgttacccatccttggttgcacaagccccacgtgtcttttgttagctgggtccttgtcactcttccctcctccctcctggagattgctctggaatgttctcctccccttaccagcggcatggcaggcagctcctagtctctggagttgcactgagccagccgctgcctgtgtgggaccttggacatatcacctcccacctctgagcttcagacttctcatttatgaatgacctggacttccccgtctgatgtcctaggatcctgtgttctgtgctttttttttttttttgccccacctgcagccagtttgtgtttgcacatcctcattgaatccaggtggggtcattctcacccattttacaggtgaggagactgagccctagagaagtgacttggcttaaggccgcagagccttgctttcaacccaggtgtgctgactcttgcctggtgggctctgcctggctgccagcccctcattttttcaggctgcacatgataaggaaaatctgggctcccaggcagctggctccagggcggctgcgggtgagtaagtatgcgggagattaccctgaggtgccctacatttacctccagggcagcacagtcacttggaataaacagtggagagacccaaagtacatattaggtttccaaaatagccttgggagttgctgtttttctcaaagctgtaaacataaccctgggcctgggggcccccacactctcctgggcacagaccccctgggcctcctgcctcttgacctgagtgcccaaagacctgctgcccagaccccctgctggcttccacttaagcaagagccagcagacacgggatggggatggggtggagggtccatgggggcttggccaggcctaggcagaaagacaatgtcccagggatggagagccgtggacaccaactttcccatcatctgctccatgcaaggtaggcccaggcttcaaggtgcagagaagagagtagcagagttggcctggactgtggaggttgtttggggaaactgaggctggcagggaggggctggcagggtggccatatctaaggcgacagggctgcattggcctagattggatctcctagagaaggccctggagatgacacttactgggcctttttaatccagtgaatatttatggggcctcctatgtgccaggctctgtgctgggcactggagttgcagctgtgacccatagatgggcctgatcttgaaagagatgagggccgggcgcagtggctcacacctgtaatgccagcactttgggagtctgaggcgagaggatcgcttcagcccaggagtttgagaccaatctgggcaacatagtgagaccttgtctctacaaaaaaaaaaaaaaaaaaaaaaatagaaaaattagccaggtgtggtggcatgcacctataatcccagctacttgggaggctaaggcaggaggatcccttgagcctaggaggtcgagagagctgttgttgcacccctgtgctccagcctgggcacacagcgagatcttatctcaaaaaaaaaaaaaaagacagaaggagagagagaaaagaaagatgagttaagcagaggagaccagcaggggatcagtaacctcaataccaagtggcccagagcctttgtagtacagaatagtggcacttgaccctgaccaaggagtcgggtcagcctcctggagggggttataagctgggtcctgaagtcacattaggtaagggagagagagaggaaaaggacaaaggggaaggggtgtagaacctgttgggcagagaatgcagcccatgccttggaggtgtgatggagcttggcacaggggggctggaggtgttggggggatgctattcagccttactctaccctagcacgtggccttgttctccagggcttatcacccaccaggtgagacctctgtctacccttttggagaagaagtgtctggcccatttctcagatgagcctgatctcccaacccttgctccttggggaaggtagagggccactggtgaggaagaacagtatttatagcggagtcttcctgcacccaacggaggcaatcttttgactaatgaggaaactaaggcacaaaacattgttgctgcaggaactggagtaagggcccaggaccctgcttttccttggctccctgggcaactgggagcctgtggtagagaatgccagagagcgttctctctaacacgtcacacatggctctttagaggggcacaaaagccttttctacatctgcacacttgatccagaaacccaatctgggtatcccagagggatacctggacacatatgcaaatgtgagggtacaaaggtgttcacagtcttgtttagattgcaaggactctgcgctgacagtggaggacccatcaaaccagtggccctgcagccacctgctgtgtcacctgctcgggaggatgctgccgtatattgttaggtggaaaaaatgcatttgaaaaccacatatggtcgcatcccgttgtcgttaaaaaccaatctcataagaagagaaaatctcataagaaaaagttgggaaggatatagagccgatgttaaccgtaattctctcagggagggggattcatttgggtgggttttacattggttttatctggcttacctgtttttttctttttctatttcttgtgtaatcattgtaaacactcatgcaatttaaagcaaggggaaaacgagcaggtatttttgtcttttaaaaatttaagtggttttgatgttttgagcaggtatacatgacatcattcaaaattaaaaagatacagaaggaggggaaattctgacacacactacaacatggatgaaccttgaggatattatgctaaatgaaatcagccaggctgggcgcggtggctcacacctgtcatctcaatactttgggaggccaaggtgggagaattgcttgagcccgggagttcgagacctgctggacagcatggtgaaaccccgtctctacaaaaaataatttttaaaaattaactgggcatggtggctcatgcctatagtcccagctgctccagaggctgaggcagggggattgcttgagcccaggaggtggaggtgcagtgagttgtgtgattgtaccactgcactccagcctgggcaacagagtgagacgctgtctcaaaaaaaaaaaaaaaaaaaaaaaaaaagaaataagagaaataagctattcacagaaggacagatactatctgattctatttatacaaagtacccagaagtcgaatccacagagacagaaagtagaagggtggttgccaggggctgcggggagaggggtacggggtactactgcttaacaggcacagttgcagttttgcaagatgaaagagttctggagatggatggaggtgatggttgcacagcagtgtgaatgcacttaatgccactttaaaaatggttaagatggtaaattctatgttatatggtttatttatttatttatttttgagacagggtcttgctctgtcacccaggctggagtgcagtggcgcgatcttggctcactgcagccttgaggtcctgggctcaagcaatcctcccacctcagcctcctgagtatctgggactataagcggtgccaccacacctggctaaattttttgtagagatggggtttcgccatgttgcccaggctggtctggaactcctgggctcaagtgatccacctgcccaaagtgctgggattacaggcgtgagccaacgtgcctggcctgttatgtgtattaagaaaagatacagaggggacagagtgacagttctaccccataatccccagccacccacgtcgctgctgaagggaaccaatgttttcagtgtgatggtggatgcttggtttcctttctcgtgcccctgggtacaaatgggcagtggcaacttggatggggccccttcactcatggacggaggaagatgccccctgtcccagggtgagcattcccttccatccctgcttgcctggcacaaggcagccagtgcccagaacttcccacacttcttgggttgaagggattgaggatctgaggctggaggagccagaggtcctgccccagcgagagctccggaactcgcctcccctctctcagcaggaagagaatactcttaatccacttctgtgtccccagcacttggctcctgggtgagcacttgggaaatgtttgttgattctgtcctgggggaagaagatgaaatgtaagccggcagccagcctgagttgggctgtgggagatattctgggctgccgggcctgggtgtctccagaaacccccaacgctcgctcatgaaggctctcttggtgccaggtcttgtgccaggcactgggatatggtgccgaattggatacaagggagatgggacgtcctcctgtgtgtcttgactgtcggtgtgttgccgagcattggtagcagagggggctggtttggcacccaggtaccctgcctcatccccggggccttggccagtctacacagaggaactgccctccagctgagttacccattttccatggcagggaggacagcagaaaggccgtgttccatgactaatcatagcttccatctattgagcatttactgggagctgggcactgtgctaagtgtgaaacgtgtgttgactcatttactacaacaacctggcaaggcaggttcttccgttagcccctgctcaaagctaggggacctggagcacaggcggtcaagtgcttggctcaaggcacacagctcagaagtgcagatcctctgcccctcctggcatcccagtctgggggggtcaggggtgggatctctgcagtcagtgcctgggggctggatgacaagctgcagcctccccgcaaccccacgatttccatagcgcagtggagccagaaagaaacagaccattttacagaccagagaaacaagggtgctgctctctcagaccctggagccagtgacagggaaggcggagaagggacgagagcctccgtttattcggagcctgtgtataccctccttttcacaaactgtagcagcctccagaggcaggggggatctttatgatgaccaaatggggaggcttagggattggaaatcacttgcccgggagcgtgtggttggtaccactgggatttgagccttgttccgtccagctccagagcttggtgcctttcttgctcaccacgtgccggccccagctcgttgccttggcagtggaggtggtggtgtgccgaggccttcctgcaccctgggttctctggcgctgagaaataagtgcatgggcaaagtggctttgtttccaggtcagtgactgtgaccccatgtgtacacatctgtgcatctgaccgtggcactgtaacccaggggcattttctaagtgatgtgctgggggtgtgggcagggagtggggcttatggagccgacgagacaccatcagaccatagagaggctgcccaggcttgggagccatatggacctggatttgaccttgaacaggtcatttcacctgagtgtgtatagtgggaatgataacatccggctcacagaactgtggtgagaattagagatggtgggtgtcgaatgattagcacctaatcagcattttacaataaatgcaaattcttcccttctcgtagaagagtggagtctgatgagagagacagggaagtgaaaattcacagcccctggatgccagtgctgaaggagtgggttcaggactgggaacatcagaatgggcatagtgacttattctggggaagtcatgaaaagctccctggaggaggtgatgaaggggtacccaagcctggaagaggctggcagtggtactccagaaacttcatggtggcctgcaatttgtgatgcagatttttcctcactgtgagatgctggttgagacaatttcctccttggagtggcctggttttttaggggtagggggagtgcccacgtgggtgtagtttctagacagaagcagtgggaggagggcactgccaagcatgctgcttgggattatgggtgtccacagagctgcagtttctccaaaggtgttttttgtttgtttttgagacagggtcacactctgtcacccaggatggagtgcagtggcccgatcctagctcactgcaaccttgaactactaggctcgagggatcctccaacctcagcctcccaagtagctaggactacaggtgcgtgccaccatgcctggctaatttttaaaattttttgtagggatgggatctcactatgttgttcaggctggtgttgaactcttggcttcaaatgatcctcctgcctcagcctcccaaagtgttgggattacagccgtgagccaccatgttcagcctctccaaagttgtgttcaataagcaataccaagtggcagtgatgctgggaacctgggcaaatatagacaggagggaattggacaggtggctcagaaaacaactgaaacctcagattggcattggggcaggtgacccgggggttccctgggccccatgttgcccaaaagagccagcagctggcctgggtgaatacccttaaatgccttgtgtgtgttggaaggtgccatgagaccagctgggctctcctgccctggacccacctgctgccacagtggcccttgttaggacagacctcaaagggctgggcatgcccattagttcctggggtatgtctatggggtgtggacggtgaaagcagggttttcagtgggttttgctgacgggggttctgtggcattagcatctggcttctttccttctgccaccctgtccccttgtactgccagccacccagccaggtgaaggcggcatctagctcattaccatgactatcaacaacatgactgttatgcagacagtggctctggggtcagatggccttgggttcaagtctgaccccctcacttacgatgtggtccaagagcattctcccagcctctccccacctctctgagcagctgtcattgggaggtcgtgaggatgagaatgacaccaatggcatgctcatggtagaccaggcactattctgggcacttttcatatgctattccatggaatgtgggcaaaacccctcggagctgggaggtattaccaaggcccagagagggtcatagcttgctcaaggtcacagaactgcaagatggatagctgggatttgatcccaggaccctctggctccagagtccctgctcccctctccactacacacactggttggaacgcaaggacagacgtctcagctggcttttgagcatttgtggtttgtcaggcggctttgtggtcagtgtaggatgcttgtccagggatcatggcagttgttttctggcttggctgggtgggcccttagaattcatccagtttgacatcattgcattactgatgggaaagtggtgccagaggaggggaagggacttgcccaagatcacggagccagctggggcagaggcaggactagcttcaggacttccagcacaaggctgctgcctcgttgcctgaaggggtgtgtggctggggggccggagcccagttaggggcttgccgttctttcccactcacctctcacctctcaagtcaccacagagagcccagagaccagctagctgccctgcaaagggccccttggtcaccaggaaacaagtggggggaatgtcaggtgaggggaatgtcaggtgggggaatgtgatgaccccacacagctcatcccccctgcctggcgatgggactcactttcacctccttgctgggaaaactccttagcaactcgatttcagtgctgcctctctcagttgctcctgggtccccagagggccaggacaggttggagaagtgtccttgctgagggggcccagactttcacccacccatttgcccctccctcccccaggtgggtagagccagggtgacaccggtgaagagcatgggcatcatctgtcaagggcatctgtgtgcctcacttgagcctgctctcctgatccatccatgagccctacaaggtgggattgctatccccgttttacagaagtggagactgaggctcctagcttgaggtaggcaggccctcaggggatcacacagaggcagatgactttctcagctcacctgcccttccttctgcagaattgcctacaacctttgactctctaaggcctgcggggctcgtggcaagccctcaggaactgtttatggaatgaatgagtgaggggcaaacgaatgaatgcatgctcccacaccacgctgctgcttcttctgggagagggcacccagcgggtgtctgctgttgagtgcaggctgtcagagccctgatggcacccaggataactccggatggagttggtatccctgaggctgtcaccacttctggactccaaggaagggccctatccagggcgtgcaaataacactgcaaatgtcatgtcccgagggattttgggagatcctattatagatggggagactgaggcccagggcagagaagggacttgctcagggtcatgcagcaaattagcaacgcagccagggcatgaaccaggacctcctgcttcctagcccagtacccgctcttccacagggaacttccctatggatgtcagacccctctgcctctcccctgagcagccttgcgcagacctggcacgctgggatccctggaggaggctgccgtttctggttgaaagcagctctgtgtgtctgtgtgggtggcagtgttctgggggcacacttgattagtggcttctcaaacctggcccccatcctcagtgtacagcctgtgctccgtcctgctcaggccattactgcccgcctgtaatggaatcggctgccctggttaagtgttcacattaaattaatacctcctccgtggagacaatcagttggcatttaatttgtctttccttccgagagctggagagtacagctgggcagccgggctctgatgggcacgtctgcgagacagcctttccttgggatcaggggctccatggagatgggagccgggaggccacaagaggtggtgccaggtgtccccagggggtggggcttggggcaggcaggagggggcctctttcatgcgcaggggctagagcttattggctgtccattttcgggggagaagacgggcttgcagcgtgccatgtgggagagaaagtcaggaggcaaggcatccacacgtgcatcagtgctgagctgcccaggaggtgagccctgtgttagcagtggtggcgggatttccacattgtattcccagccctgccccactcccactcccttatcggattttctttctgccttaaatatgaattgtctgtggtattcgagggggatggtgtgcaaggaggaagttgactcggttgtggttttcaggttctctagaagggctcagaagaagcaagtggaggctgttgggggcacgcagccctgaccccaccggggagcctgctctggtcttcccaatccatcagcttctgcaaaactgcatttgcagaaagggctcccctggtctaccactgtgcctgcagcctcttcttccagctcagatattattttagagaagaacagctgattggggcccccaggcttggccctggctctgctgtgaggatgcctctgtgcatctgcaggtgggcaaacacaggagctagggcagcgcagagctgaggggcattggctgggccaaatctgtggtttgagcagccgggctccagcacagctccctggccacctgcatccagccctgctgcagtggggtgagctccccgaggccagggtggagctgagaaggtgccagccctccacccgccgggaaggaagctgctctctgcccccacctgccctctgccagaggccaggcccacgcttggcccagaatgaagtcttccactgagggctccagcccagcctcacctgagctcatttcccttcacctgagtgagtcggcctaggcgtgccggccgctcgccttcccgcaaggtgtgggccatttccacacctccctcccaactctggaggtgggaggcagccatgcgctgtgccgttgacgtggagctgctgaacacccatggtctgctggatgccagggtgcttttacccacaccatccccttcctgtagttctcacagccaccttcgaaagggggtggctggtttcccaactcacagaggggacaactgaggcccagagagggtaactgacttgctcaagatcacgcaactgggaagtgatggggcaggatttgaacccgtctcttgctgccctggtgtcttgggatgctcactccaggagccccaggttcgtccctggagggcttcattgttttgctgggcctgcacctactttcctcctgagcgggagcctcgagcctctttttctgactgcacaggaagtgaaaaatctgtgagtcagcccctctgctggtgacttcagcttgggtttccgcccctctgtagggcaggcttgtcggtccctttcctgcgggtctgtgtgtcatcttgagctgacgggagagggggaggcactggccctgagtggggtgggggtggggactggcatagaatctgcccaccccttttccccagaggccagcagagacttctcgtccctcacgtggttccagtggtggctcctcaggaatgcggagagaccacatctggctggggtggtgctgccacctctccctcctggccaccagcctcagagagtgcttgttctgctaagatggtggccgaggcccctgatctcagctgctttgtgcttttgtggagtcatttcctctccctgcactctttgttctgacatccctgcctcccctccctggcccagggctgtgggaagtgggaaagggaaggtttctccttctcctgcctgcttcctgccctggccatccctccccctggcctggcctggcctctcccaggagaggctctggagccgaatggatgaagctgagtgcaggggctatgctgggaatttgcctcctgtgagcccctgggctgggatgttcagtctaaggatgctctgggggaaaggagttctgtctggaggcgagggccatcagggcactgaggagtaagtgcagctttggatccatccatccatccatccatccatccatccatctatccatccaaccaatccatnnnnnnnnnnnnnnnnnnnnnnnnnnnnnnnnnnnnnnnnnnnnnnnnnnnnnnnnnnnnnnnnnnnnnnnnnnnnnnnnnnnnnnnnnnnnnnnnnnnnnnnnnnnnnnnnnnnnnnnnnnnnnnnnnnnnnnnnnnnnnnnnnnnnnnnnnnnnnnnnnnnnnnnnnnnnnnnnnnnnnnnnnnnnnnnnnnnnnnnnnnnnnnnnnnnnnnnnnnnnnnnnnnnnnnnnnnnnnnnnnnnnnnnnnnnnnnnnnnnnnnnnnnnnnnnnnnnnnnnnnnnnnnnnnnnnnnnnnnnnnnnnnnnnnnnnnnnnnnnnnnnnnnnnnnnnnnnnnnnnnnnnnnnnnnnnnnnnnnnnnnnnnnnnnnnnnnnnnnnnnnnnnnnnnnnnnnnnnnnnnnnnnnnnnnnnnnnnnnnnnnnnnnnnnnnnnnnnnnnnnnnnnnnnnnnnnnnnnnnnnnnnnnnnnnnnnnnnnnnnnnnnnnnnnnnnnnnnnnnnnnnnnnnnnnnnnnnnnnnnnnnnnnnnnnnnnnnnnnnnnnnnnnnnnnnnnnnnnnnnnnnnnnnnnnnnnnnnnnnnnnnnnnnnnnnnnnnnnnnnnnnnnnnnnnnnnnnnnnnnnnnnnnnnnnnnnnnnnnnnnnnnnnnnnnnnnnnnnnnnnnnnnnnnnnnnnnnnnnnnnnnnnnnnnnnnnnnnnnnnnnnnnnnnnnnnnnnnnnnnnnnnnnnnnnnnnnnnnnnnnnnnnnnnnnnnnnnnnnnnnnnnnnnnnnnnnnnnnnnnnnnnnnccatccatccatccatccatccaaccaatccatccatccatccatccatccatccatccatccatccatccatccaaccaatccatccatccatccatccatccatccatccatccatccatccaaccaatccatccatccatccaaccaatccatccatccatccatccatccaaccaatccattcgataaatgtctgactccttagcaagtgcccagccagtttgaggtgcagggaatacagtagcaagcacaggaatgatcatcataaccagctctctgggcctgcagaaggactggacccccgacctgagacccggctcctgtgcctgttttcccacctagaccagggaacttgcctcttgcttcctctttgccccatctctgtgcctgagacctcccgagatgagtgccagcccccggtggcggtggggaaggtggaagtggcggtgaccacacaatggagccatcactggccctggcgtcacgggactggctcctttgggcaagagctgtgtgccgtgggatcccacaaccatgccactggggaagaggagatcctggggcctccactgctttaagctgtggggcaaacaatggaagtggatgtgaggcttggggaagagatgacatttgagacaagcctgggagaatggctagggtttcaggaggctgaggaggagagaggaagaggggaaatgagttacctgacctctgagcctcatctgcaacatggggatgatccccaggggagggctcagcgggattttatagagggaagtatgagtgcctaatgtggtggataccaccgagaaggtaatcaataaatgtcccttctctcatccagcgctagaaaagagaaggatttggaagttttatgagctgttgggtcagggtgggcaggggcggctctcagtgattcaggccgtgtcagccgtggctggagttgtccataggccctgggtcttcattttcccacttgtaaagtggggacagggtagctttccagcccagtgcatgtgcagtatgatggaggggatctatggaaaggccctgcagagagcactgggatgtgtttgtcacctcattttctgccagtggcaggcctgtcaatattctggagtcttcaaaagaccagaaaggacccctccccagccaacagaacagctcctggactgctgagggagactcgaggaaaatggcctttgtgccccaaaagtgatctctttatgttcactccagccttccttcccctttcagccttaaagggcccgggcgtaggattctgtcagacctgggttcgaatccaggcgctgccacttcctaggcagtctttgggcaagtcgtttgctcagccatgggctggggctgggagaggggatggtgcaggctgaaaggaaacgatgtctgcaaaccgctgatccaaagtaggtgcacccgcctcttggtggcagacagcgcctggcctgtcccttcctgctgccctctttgtttctgttggtccctctgcctgaaacaccctccccactgaaaccttactcttgtgggcagacccagggaagagggagggttgtgcttgggaagctggtgttgaaatctctgtgccagcaacttggttcaccagttctcagttaagctgagtgctccctggctctgggtgggtgggcagggaatacaggtgtctggagtgccgtaagaaacacatcgcccacctggcccttcatgccagtcctcagaacgatccaaggacagagcttttctgcattgtcaacactggagctggcggagccaggttttctccaccaccgccgggagggatgtcagggcgggcgacaggctcttcagtcaagccagctgctgtccacatgcggggtctgtcctcaacctcctgggagcaggccagccggctgcctcccccgtctggctttggaaataaaaagcccgtgaaatcatttgtgcaagctcatcctgggggtgtggtatgtgcagtcaggaaacacgattgagatgtggggttgggagggtgcagaactcggggcaggaagggagaggtgaggtggaggggctgggttgtgtggtcttcagagcctggccactcagtgccatctgtagcccagcatcactggggagctgtctgccccagccctcgcctgcggaaccagcttctgcatgttaataagatgcccaggtgattggtatgcacattctaggctgagacacgctgctttagagactggactagctttgagtcccagctccctgcttgctagctctgtgaccttagacaagttactttacctctttgaacctcagctccctcatctgcaagatgggcttagttagaaattctttccccaagagggttaataattcacattcaagccagtgatgtgtgtgtccaaggcagtgagccgggtgtgtggggcccagaacgtaccccccagttaatggttgctggtgctgttgctgttattgtgtctggaaagccaaagatctgggctcctgctgtcaccttgggtggatttggggcaagtctcattccctctctggtcctcgttttctccgtctgtacaagggttctattggcccctgcctcgccttcctcatgagatggttgctcaaaggagaagtgaggggtgctgggcctcattcccaagggcccctctggggaatggggagtgtcggggaggtgcccctgggtgcctgcgtccaagggaggagccatgccattctttattttttgtgcccttctttgctactcctgctcttgctgcaagatgtgttagcaggttcgctctagactccaggctgcagccagaggcttgccggggctcgcccttgcacctgccctgctcagcggctttggaattgagtcgccttccccgctctgagccgtgtggccaggagagatgattcagctcgggacctgtgctccagcctttaccccccagagaagccccagatgccctgtgctcctgggcagggatggggtggcctgggaactttccccccattgtgattcctgtccccaacatggggcctgctcttctcggtgagaggtggcctgggaccggactcctagccttgctcctgatatactgggtgatctgggcaaatggcttgaccactcggcttcagttgccccatctgtacaatgaggggaggttcagtgagatggtcctggctggattaggcccttaggttccctccctgccccctcttagctttctctgtgccctccagccctggaaggaatcccagccccttgccctccaggtccgggcccgggagcccacgcagatctcagcctagcagctaatgctggggctgggaaaggctggagaaaagggggagagggagagagtgtgtgtcctccaggagccctggctgggctgtctcctgtgggagagaggaggaattttcctctgtgtgtgcaaacagtatccgttttctcttgtttccaaaagccggtgacgtaaccggctctccacccctccctcccctctggcctatttttagctggccctgacagcatcctaaaagggttccagactgccctgctccgaggccatgtagggagggtagcagtggggtgaggaaggagagaaactcctctgtctgtcccaggatggacagacatccgaggagggaaagaacctgcccccagcttcctccagggagggaggaactctgttggaggagctgggttagggcctttaggctttgacagttcctgggtctatgaggagctccgcaaggggattctgagcaaccagtctggagcgtccccacctgggtttcagtcctagttccacactatctcaccctggccttgggttcagcttgtgcctctgggccttgctttctgcacctggggataatgacggtgcctacgtcataggttgttacgaggattgaattaacttcatgtagaacagtgcctggtacaaagtaagtcccagtgaaggtggttctggaattggtaatatcatccagtcccagggaactgctcccaccccttcctgcagttaagggcgggggtccactgaaccctcctttgccttctcccctcccgcccgcgtttcctattcagcttcgggcagtactcgtgtcaaagtagtggtgtggaagcccttggaacaacagggcttggcacatagtaaacgctaaatcagtgggaactgtatttattgagttttgtttcaatgtaataaaacagccccacctgctgactcgctgtgtgtctttgggttagatgtttatttaacctctccgagcctcagtttccacttctgtaaaatggaatgataacacctacgtaggagagatctgtgttggtttgggtaggctgtcgggcatcgcaatgcttagcacaataaaagtttgtttcttgtgggtgcaaagaacagcctgagagtggagctggctgcagcctggctcctaaggactggctttgctactgcatcttgcagcaacaacaggagcagcagtgcttgcacagcactttacagtttgcatgcaggcagggtggtggtccctcccacctctgtcttcacgaagtgctgggctcataccttaacgtggcacttgtcaccaccacctgatactctggttatatgtcagcctggctgtcctctcacaccacctcccctaggctgggagctcccagagggcaggcagggatggatgccccaatgcaccttccttgcccagctcaagatagtccctgggtgggtgttggggttgtgtctgagggctggactggcacagggaactcaccttctgaccacctgttcctcttggcttttgcaggtgggaggaggagctcgccaagcgcatgaaccttcagaccatggtggacacgctgcaggaggtaagagccctccgatatcccgaccaggagaggcacgccagagagccatgtggccaaggggcacagtcttcatgcggcaaagccaggaaattcttgcacagcccctactctgttacctcctaccacctcagtctctcctttatggagccaagagatcccttccacttcctctgcttggaagctaggaatggaccagcacagtgttgcacaagagctctgatgcaggggttgagaagcctgggtccaggtcccggggtgcaagtcccagctgctgtatgacctgggaccagcgacccttctcacccgtcactgtctccccacctgaggcttggactaggtggtttgtaagcccccaagcaagaagggtgccctcggttggggctgaaggccttggagagggcaggtgggcacgtcgcaggtgggctcccagcctgagcaggctctctgtggtgggcatttgggaacattccccttgctgctctagctggaatctctgcattctgggctctgcaactcccccacctgcggtgtaacctgggcagcaaacttcatcttctcagcctctattttcctctctgacaagtgggagcaagagtagcaaccccatgagaaggcatgaaaagttcttccaaaaatgtctagaaattgcgttctgatactgaaagcatttgtcgtctaagacagttagagacagattaagataattgtcaatgcgtagaaggaaaaggttgaatatctccctttcttttataatgaaagggcttttttctttataaatttaacgggttcatcgtcaaatatgtggaaactatagaaaagcccaaaaataaaaattatttccagttcctccttccacagttgaaaaactggcgtgtgaccttccgatcttgtctgtgtggacacacacccacgctcttcagacgcatgttaggtcgacacacatgacattgtcatttttgaaagcagagatggcccaatactggcagtttcacacggattgatctcatatttttaacgtaataggattgcttgttaattaacctgctcttttaataccttccatggattttcccacgtaatagataacgctttgaaaagtgttttaagcagtcaacagtgttcagtgggaagtcaggctgggatgaggtccttggtgccccttccctggctgcaggtgcccagctggggtggacatcgggtgcctagggctctggactcaggtgtccagaccctcctatccccagaggacccggcccctctgaagcctccccatctccgtccccgcaggcagcacaggaggctgatgccatccaggaggagatgaatgagaagatcgagcggctcaaggccgagctggtggtgtttaaggggcttatgagtgacgtaagtgccgcccgccgcccctgggtgtcatgacctcccccacacccatcatgcaaaatgcttcattccctccgaggctccggggctcggcttctagttagaatcctggctggctgtgtttgaccatgaggatgacggatgcattggatgcatcggagaccaggcaccctcctcccgccccctccccacttctgcttccctcggtctgagtagagatgcattaatctgccgcttaacctatcccgccctcccccgggctcccctgatggtctgtgtgtgtttgctcccactccttcccagctcgccttgatgagggcaggcctcggtgtctgggcgtagcagggcgtctggcaggttgggccaggtgccgtctggtctgtgcgggcctgagagactcgcaggcccagcggcctttggcagggttgctccatgaggtcaggaaaggccagtgcgcgtgtctttttgacaatctggggcccctctaagtatctgtgggtggggggagctgttggcagcaaagggctccttgctgctggggacccaggtctcctccccttcaaacagtgggcagtacagggggagaccccaccagaaggcagaaggggccagaacgtgggtgactgagcctggcatggctcctggtgtggagggacgtgaagctgggtgtggttggtagaagcctcccaggaccctagttggaggccactgggctccctctcacttgtgtccaaggggatcaaccctgtggtcctcagtgactcccactgccggccttgggaggcatccaggagagagagctgcctgtgtgggggacaggtggggtgtgccggtgggaaaagaagggctgtctttctccagcgggagttgtcttttttcttcgctctaacaaagtgaacacggaccctgtgtctgctgggaggatgccttccagcccttagggagagcagcacacacggcgtcacactggcccctgactcccaaggccccaaccccatcccaccctgaccagtgccgccgcagccctccactccacggaaaagcccaaggcaccctcggactctggaggcctccccgcaccacccctgctgacacctaggggtctccccacctctctgccaagccccccaggcttgctccatccctcgctcatgtaaaccctgctgtcctccctgcagcccatgacagacctggacacaaagatccaagaaaaggccatgaaggtggacatggacatctgccgccgaatcgatatcacggccaagctgtgcgatgtcgcacagcagcggaactcagaagacgtgtccaagatcttccaggtgactagggctgccctgctcaccagccaaccccccactctcccagagcagccctggcctccacccctgcccggccaacccgtttgcctccacatcccactcactccctccccttccccgagaggtagcactacctgaccctgtggcctccccaggaaaacgtagaatcaggcacccgtggactcataggctcgtctgactgcttcatcctatggctggggagaccgaggcccagagggtgatgtgctgtgctcacggaaggaagtggcagaaatcagtctcctgcccctccagggcttggttcaccagcccacactgtacccattgtcccgcttcctgccccttcctctgggtgccagaactgggcatcatccccacggttggggaaccctggccaggttatggggagaagtgggggagctggcctgagctctggtagaggggcctcagagttcagaagaggagctgttggcctttgactatttttcattccaccccaaagaggctctcgatacccccccgacctaacgtgcaagtgtgggtgcccccgagagacggcgatcaggttagcgccagtgaggctgtcttccagagagggcttggggggccagtccagccgaatgaggcacatgtcattctccgaaggctgcttcttgagtttcgggttgtggtttggcttttgcttgagcccagggcaatacggtgtgttgtcgctctgtgtgtgtgactttgacgtcgctgggccagatctgggcctccctggggccctctctccacctccatgccttcttgctgtccctctgccgggaagcaggggaggccaacgcagccttcgtttgctcgtggcttgtctgcttggagtggaagctttcggtgaaccttgggccgtctgtcctttgcctttgcatgtgagcaggagggctctggtcagcatggggccgtatagcctttgtcaggggttctccatctctctggctggctctgagatatcccaggcaactctgtgtcccggtctggcctgctcctctccccaaactgtggggctgcttctgtggtaaaagggcgagccgagccggcgcacccaccaggccgcccagggcagggaagagtccaggccgtctgtgtccccctgcatgtctcccacctcgcgcttcctgctaacgccgcctgcttcttagaggacctgcacctttcctggcactggccggccccagtcacgctcatcatcctgtgagatgccggctcccttcccagttcacccctaccttccatcctagccgagccccccagttaccttgattgcttcctttccggttcaggtggtccccaaaaagaaagagcgtaaggtggcttccgatgatgacatctctgagcaggacggggaggtgaaccggttctcggacgatgaggtcggctccatgaacatcaccgatgagatgaagcgcatgtttaaccagctgtgagtatccccgtggcccgcacactctccgtttccccggattgcttgcacaggggcggtgaatgggaggcttgggctgagagtagcctgcagcactggaagaatttgaattcatttcctttttttttttgagacagggtctcactttgtcacccaggctggaggctggagtgcggcggcatggtcacagctcactgcagcctcaacctcttgggtttagggatcctttcatctcagcctcccaagtagttgggagcacaggcatgtgccaccatgcccagctaatttttaaatttttttgtagagacagggtctcactgtgttgcccaggctggtctcaaattcctgagctcaagcgatgcttctgccttggcctcccaaagtgctgggattacaggcgtgaaccactgcacacagccaagactcattttcaacatttgtaatttgggaaatttcatatgttcagcctctcttggaagctcgaggaggtcaggcattgctgagcctggggcacagttgacagggctggatggcagctgctgaatctggacaggcgcatactcttccattcgccagcatcctttatgttccctgtctgccattctcctgcctttccttcgaaagcttcctccaaaaaagcggtgggagaaggggtgttcttgcccatgagatacaggggctgggctgtcctctctctggacatgtctgtgtctgaggatgtcatgaacccagaaggggcaatggcagatgtggtcttatttgtaggctatttttttttttgagacagtctcactctgtcacccagactggagtatagcggccagatctcggctcactgcaacctctgcctcccgggttccagtgtttctcctgcctcagcctcccaagtagctggaatcacaggcatgcaccatgatgcccggctaatttttgcatgtttagtagaggcagggttttaccacgttggccaggctggtctcgaactcctgacctccagtgatctgcctacctctgcctcccaaagtgctgggattactggcatgagctaccattcctagcctgtgggccgttcttgagcagaccttaaccagacccacctgcactagtttcccttggtgggctggctgtgttgaccgcacggcttgcagaaatggctcctgatgttcgcttggagggggcttcacaaatgtcactttgctcactccagacgcccatcctaggagatggggtatcactccccttttgtagacagggaaactgagactctgagaggagaagggacttgggtaacaccactcagctagtatgtggctgagctgggattcagagccaggctgcctcccacgctagtacgctgtcagtaggaaacactgcttggggtggtggcagggtctgggctgggtatgatcagtggtgggcgagcctgctggcgccagctcttagaagctgctatacccactccaggctcagtgatgtcatattagtaccttaaaatttgccattgcaggaaatcagcaaatgctaccaatcagagctctgggaggctctgccacctcccggaagccccccagagagggcatgctccttctagcagatgcctttgacatcatttgtttcaaaagcccagggcacgggctctcctaacctccctgcagagctctgaggctggctcagaattccatagtccagagctcactctgcccagccacttcattgtacaaatgagagaatggactcagaggggcacacagagccaggcccccaactcttggtccagtgctttgtcccccacgccatgcctggaagagaattctctcttctgtccctattctaggctgacttttaaggtagacaggaggcagaggcagggttggaactgggtggggacaggaactcttttgcctgatacttcctggacctgccattcccttgaaacagaactgggatcggagctgtattttgggggtttgctatttaagggtgataaggagacccctagattcttgattcctcttttgataccccccatctcatattctcatcttttgctgcctgccaagaggggcttttttttttttttttttgagatggagccttgttctgttgcccaggctggagtgtggtggtgcgatctcagctcactgcagcttccacctcctgggttcaagcaattctcctgcctcagtctccgaagtagctgagactacaggcacacaccaccacacccagctaatttttttttgtatttttttagtagagactgggttttaccgtgttgcccaggctagtctcaaactcctgtcctaaagtgatccgcccaccttggcctcccgaagtcctggaattacaggcatgagccactgcacctggccaataggggcttttggaaagaagcagtggttgggtctaggttttctgaacgttgccctgggcacttctgagccctaagacaggattgtatgtcccggagatcccaggctgggtccatgtggttaaattaaaggacttatctgaagaaattgttgtccctgcttttataaagtccccagggcattgttaagctgaccagcaatggagtgagctaaaaaggagacagatcagagtggaagccagggggccccatgggcaaaggctccagtgtgtagaaagagcattcagatccaagtcaggcgagactggctgcaggagtgggcgcctctgtgttgatagagctaaattgggttcagtatggaattcgatttagctggttgtaaagttacctaagttaaaacaaacaggccgggcgcggtggctcacgcctgtaatcccagcactttgggaggccgaggcaggcggatcacgaggtcaggagatcgagaccatcctggctaacacagtgaaacgctgtctctactaaaaatacaaaaaattagccgggcgtggtggcgggcgcctgtagtcccagctacgcaggaggctgaggcaggagaatggcgtgaaccccagggggcggagcctgcagtgagccgagatcgcaccactgcactccagcctgggcgacagcgagactccgtctcaaacaaacaaacaaacaaacaaaaaaacaacaacaacaacaaacaacgaaacctctgatcactttgatcaccccccacccccattctgcagttctgtgtgggccgccctgaccccaccccaggcggggccctgggcctttcccatggacatctccaccagctgtgggcaggaccctagccaggctgcccctggccagatctgatgaagtgtttgaataatgcagccgtgttacagttgtgttttgttttgatccaagtcggttgtttgggcttcagaccaaggagaagagggggaacgtgtgggtctcccccgctggggccaaggctcctcctcagccccactccgcagatttgtgaagtggaggcctcttccgagtcccttctcttgcccgtctttctgtcctttccagcttcctgtccctcggctggggtttccttcagatcccagacgctgggaaggaagtgaagtcaggaattgagtgtgtgatgcagtgaccactggaccctggcggctccgggccacacggccctctccagcacccaccccctaccagctcaggaccctggactcggggagccacctatgggctcctgtgggaatggcttttggaggggagccggcccggcctgactccagggggcgctcgaggcagctttttaccagacggccttcttgggaccggcccagtccccaacccagtccattgggaacactcattgttgctctggaggatccaggaaggagttgagggagggcaggcaatggggagagccctgggatggcagcctggagacagggtccacattgtcctgtgctaccgatgcactgagtcaagtgatttcactcctacagactcagccttccccttggaaataggggtatgttggatgagctgatctttaggtctcctccagttggggtaaccaaggcatcttgggaaccccttagtcccaggcaaacctgcctggttggtcaacctacttctagttctagccaatagggaggtcttgacatctcccaggctttgaattcaaatctcatttccagcatgtattggtctagaaggccactgaatccctctgagcctgtttcctcacctgcaaaatgggaacgatagttatgcttacctcataggattgttttgagggtggaattgttttgagggcgttgcattttgctgcatgcttagtggctggtccagtgcccagcacctaatgggtgcttggggagtgtcttgatggggaggaaaaagctgtaggaaacagaaacattcggcattctagcctatttctgctacatgctagctgtgtggctttagacagttgagttatcctttctgagccaccatttcttcatctgtaaaataggtataataccaacctttccaaattgcagagaagatgatattatattgaacatctcactcaaactagaggctcaagaaatagctgttaaatgaatgaggaaaattgcaagattggacttggaggaaaatatctttagtcccaattaattaaagcctgacattaaaaaaaaaatacacatttttaattgtacaagcaatacataaatacattctgcattttaaaagagttaaactccttttggataaggcgaatgtcccctttggcttactacccctgtctttcctgaggacagccttgaagctgtgtacctgctgggcagctgcccctttctgtcccctgtatgggtccctggagcctgccttctgttcagtcatgccctctggtgtcacccccacaggcgggagacctttgactttgacgacgactgtgacagcctgacgtgggaagagaatgaagacacgctgctgctctgggaggatttcaccaactgcaatccgaccatcgacctgcagggcgaggtaagcccagcgcctggcttcccaaaggccaggactaggggtctgggggacaccgcctttcaatggtccctcatccctgttatttttctacagcccccaccacacagctaaactgtcccctttgggccaggcgcagtggctcatgcctgtaatcccagcactttgggaggccgaggtgggcggatcacctgaggttgggagttcgagaccagcctggccaatatggcgaaatctcatctctactaaaaatataaaaattagccaggcctggtggtgggcacctgtaatcccagctattcgggaggctgaggcaggagaatcgcttgaattcaggaggcagaggttgtagtgagccgagatcatacctctgcactccagcctgggtgacagagcgagactccgtctcaagaataaataaataaataaataaataaataaataaataaataaataaaataaactgtcccgtttgttctatttccccagcaagaggaaaacttgggcaacttgatccatgagaccgaatccttcttcaagacgagagacaaggagtaccaggaaacgataggtcagatcgaggtgagggctcgggacgtggagcccactcgtgaggctctcctgaggtccacatggttgagatcctggcgatcaaacacccatgtgtcatgggcaggggctggtagagtggggcaggcgcaggatcgggagtcaggaggcctcggggcgagtaatgtctttcttagggcctcagtttcctaatctgtcaaatgggggtggtgatccttgcctgcctcagagaattagaaagaatatatgtagctgagatgatcccataataaccacagagctgacattcgagtgatagtgagtgacacaaggtgctgagtatgcccggtatccttacctgtgccctatgcagtaggcaccgtgcaccccttttacagaggaggagatgaggctggaaaggaccaagtgacttgcccaaggccttgcggccaggaagcagcattgaagtataattctctctggctccagaggctgtgcatgtgatcacttctataaacgatagtcattgctattatgcaggagaaagggaagcccagctccttccctagaggaagtatcacttgatagaggacaagagtcagaaacatgaaaaagccttcaggatttttgtaatcaggtctggataaaggaacccaaagatgttgagttctcagaaccgggtggggtgcatcagagccaggctgctgctggggttgctaagcaaccattcccctttggccagaaggagttctaggggaagtggacccatgtgcagagagcagagggtgagggaggttgatgtccggaggcagggtcctgatggcatggtgtccaatggtggccttgatggcaccatccctgaggaatccaggaggagaggttgccgaggcttctgtcacgaggatgacttgccctcacccttattcctcattggttcctcccagctcgagctggccacagccaaaagtgacatgaaccgacacctgcacgagtacatggagatgtgcagcatgaagcgaggcctggacgtgcagatggagacctgccgccggctcatcaaaggctccgcagacaggtacccgcccatcctcccaggggattcagctatggcatccttggaggggaattcccaaggctgcaactcggccatgtgtcatgctcccaacctgtctctctgtccgtccatctgtccgtccgtccgtccatccatccatccatccatccatccagtgactattagcacacctatgtgccagatgccttacatatctaacctcatgcaagtcccaccaccaccctgccctttgttgattcaatagatacttgccaaaggcctgctctgtgcaagacggtggggccagtaagtatagcccctgccctcaaggagcttaagccccattttctgctgaaatggggagcagaggtggacagggcatgctcccatttgctcacaggaagtgatttcccttcctttcccatctgttagtctgttctcatggtgctataaagaattgcctgaggctgggcgtggtggctcacacctgtaatcccagcactttgggaggctgaggtgggaggattgcttgagcccaggagttcacagctagcttgggcaacatagcaagaccccgtctcaaaaaaaaagaaatgcctgagactgggtaatttataaaggaaagaggtttcgttgactcaccgttccacatggctgaggaggcctcaggaaacttatagtcatggcagaaggcacctcttcacagggcggcaggggagagaatgagtgcctagcaaaggggaaacccccccttataaaaccatcagatctcgtgagaactaactccctatcacaagaacaggatgggggaaaccgcccccacgattcaattatctctaactggtccctctcatgacacgtggggattatgggagctacaattccagatgcaatttgggtgggaacacagccaaaccatagcatcctcttccaacccagggcctgtccccaggagactgacaagtgtcaggcatggcacataaagcagagcccctgccttcaaagacacacagccttatcgggggacagccacgctgagaatgagctaatatgaggagaatgcctgccacacagcacaaatacgttgtcactgttttcctcgttttgctgcattactgtacgagagggagggacagctctgtgggggccagatctgtgtgcagggccgtagccttgcctttcagacctttaactcctcaaacccccagaacccagtgtggttatctccattatccagacagaagagcagacgctcaggcaggttaaacggtttgcccaagttcccccacccccagctcatccgagatagaatcagaactgcaccccagtgatgttaaccatatcccgcatggcctccttttgagctctgagtcattcaggttttacttagcacctactatatgcccagacatgggttaggtgcttggagagtaacagccaaacttgatccacggtccagctcccaaggggctttcttcctagagaagccaacacagccagaccaagtaggggctggtgcagggggttacctcgtgagcttaaaggatcttaaggatagctgagtgaggcaggagctcaggaccaggcccctctgagagtagatcttatagaagtggcagctcagccttcccactccttgacccttcagaggcccagggctgctctctgaatttccccactctcttgtgcttctcaggaattcaccgtcccccagctccgtggccagcagcgactcaggaagtacagatgagatccaggatgagttcgagcgcgaggcggatgtggagcccatggtcagctgatgactgaggccctgcgagcctggtggtcttggtgatggggccctgccacctctcctcatggggccaggaaggcccctcggagtggggttcgaagccacaccacacagactttctctgccctcccttctctggaggccctgagggactgctgcttccttccttccttccacaccaccaacgggtgccccgtctccatcccccacccacccaaggaatggtgctgtcaatttctattgttctccacattacaaatgcagacttctgtgcggactttgcagtgttaactgtgccttctcccttaagctgagccactttgagctccaaagaattattcctagcaggtgtttttatacagaactctaagctgagggccgggccaaccggccgtggtgtaatgtggtttctgccgtccgtcccacctgctcctctgattggccatgggctatgccctcccttcctcctgagccagcccagactcggcctggagcttggggtgctctgccaacccccaggaaggagccgcttgcctctgtgagctttctaggcctgggtagggaccaccccaattttctcactccctgaaggagagaaaggtggaaggaagggaaggaggacacattttaattttttggggggatcgagtggcaaagttgaagggacaaggcactgtgaggggaaggcagagcctcactgtgtttaaactactatgcaaaaaacaaaacaaacaacaaaagcagcttgccttatatcattgtggaaggcaggacctctcctgggctcctggcttccccctggagctgggagagaggccggggttagggtgatctgtgtggcagcactgactgggtagtgtgggtttggccgaggttggtcatgaggctggggttcccgcaaggcactggcctccctgaccgcttgcttccttccggacctctgggttcagggcgggggcggagggatccttgatttccctgataacttgatgttcttccctccctcgccagccaacaatagaggcttagagatctgtaatttctctgtgagaaagtctgaaggggccaggcctggtctctgctcccttctacccgccttgggttaggactgtccggcagttgcctgcttttggctgctggcaggagagaagcagggtgggctgctggcagtgcaggagctggagtgagggccatcctctttctgctcctcgacacacgcaagccgctctcagcagttccctcgactggccagtcggggtattgatctgagccagcatcccccaagacttgaatggcttgagtgggactgcgttgaagggcactgtgtggcccccttccaaatctcagcttggagccagctgagcaggctttgctttattattattttttaagcctactgcagtgggtctgttgccaattttaattttttattgtcccaggagctccctctagtggtcaaggtagcaaaatgtgcccaaggactagaacttgggtccctctgccttgcctggaggcagaaggagggggctctgggtttgactgggattgtggtccccaggggtccgtggcctttaaggctcttctctcttttctgtttcccccacctgtgttacagtcttaaaaatactgtacataaaagatatatgtagagagagagagagagcgtgagaatgtgttagtgactatgtgtgatgtaatttatcacgatttggtggccttcgtcatgagttttttcctttgttttcttttgctgggggcacctcccacgggtcccctgtggcagtctggctgtgacacttccatagtcagcatctcttgttagccaaacagttccctttgacaggtacttggagggacaatggttttggaagagagacggcccttctctctcctcactcacccttgttctaaaggttacagggttcaaacatacctgattcttgttgttattgttgttgaatttttattttaaccaaaggttatcagagccagttgggcttggacctcagctgctaaaaagattttccgtttcctcgagggcaggaaaacatccaccctcgtgggtctcctccgtccagggccgagggaggcattggacaatgtggtatgggagtttcgtgggcagcgtggaagccggccctgggttgttccccaaggtggtgggagggtgacagatatatctttagacttaagactgtaaggcagcagtgttagcatgggagtaactaaggttactgtggttatcggtgtccggcggtattatttttactttcctccttgtatacataggtcatttgtctttgaggactagggtactctagggagtttgaaaactgcaggagccagaaagagatcctggcctgagagtcccttctggctggcttttaatatctgctctcctcttgggagtgaggacttggggcaggtgggtaggagagggaaagccagagtgtgatgggcctgcctcctgggctggttcctgggtccggcctgcctgcctgcctgcctgcctctccaccacatgcttttttcagttaatgtcagtgggccctgcttgtcccctcaccatgagcccacagcttgccaagaaagaccccaacgctcgctggggcagcaccagtcctagctgggacgaattggtccatcctttgtaaagctgtaaatacttaattttgactttctatttctaagcccagtgtcatattgacactggtattttagaattttctcagatgggctctcctgcgctgccctctgtctcctgtttttgggggttttatacaaacagaggattggggagggataggaagactagcatccttttggctccctggttggttgtgaaatacacacacacacacacacacacacacacacactcgcactcctctgagactccgaacagagaaaaaaattattggcaaatcaacacatttttctttctcgtcttgagaaaatgtcttgaggtccctgaagggccaaatccatcgtggactaactctgtgggtagagctcagatgacctagggagaattaaaccacttaagcttggagtgggaggagagggggtggggtgggggagaatataagatgtaacttaagctaaatgtaatctatttataaagcaagagactctcatctatttttatgaaaggaagggttttttaatctagggtaggcagttgtggtagcccagcattttcctgtggacgagacatggtgcatgttgttgctggattgaatggaacccattcctgtcccccggcctcgtcttctgtcctcacttttggtcatccacacccatgagcagcttcagcagagtgtaggtcccacttcaccccattctcctctcctctgacccctcagctccttggaagtcttggggtggggatctgagggggtgggtgggctgcaggaaattcagaaatgtggtgggtgggggaagggacaaggcgcattagggagggaacaagctgggctctggggataggctctgattaattagttactctgactctggtctgccgagatccatttccaacccagttgcgttgggagagggttgggaggcagcagagcatgggtgacagtgggagcacacgacttccttggagcctgggcctttgcgggtcccaggtggtcaggcagctggagcagaagtggaaatggcttaagatgctcatagcccagccccggctgtgtctactccaggccaagcctgggctgcagtccttgctatgttccccccagggccctggggggagggatcagggtgctgggggtttcctaggacaggggtcttcccccttgagacaccaagctctggctctagaagagctctctcctggagtggggagtctggaggggactgggtgggtgcaggtaaagccagattctctctggaagggaattttctatgaatggatgatttccaggctcagggtgggctgtgtgttagttctgagcaaatccctcaccaagacccttccctcccaagccctcaaagaaatgaggcaaagcccttccctgcaagaccccttgtggatgtttttgcatctacctgatttttagccccacccagggagactttataccccatgatcctgccccaccgttgctgttgtctgccagctgggtctagcatcacagggaagggggggatttatactcatggaaagactactgatcctaccggaaaccaacctgtttactgtactgttgtaaatatcatgccctttatatcctgtatattggcttcttttaaataaagtgaaatgtcttagaactgatggtgcttttttttgtttttgtttttaaacagaagatgaatctggtgttgggggaggggtaggaggacggaaggccacagaaaccctcaaactcattagttaattagccataaaataggggatttcatatcacctgttacatttgtagctcacaataaaagctttggaagatgacaaagcaggaatcattacacacattttactgaaggggaagagaggacatgagacatcacaggctcagtaactggcttggcctggtttggaactgatgtccttttaaccacaaagcccccatttttccaggctctccaacgtgcccacaggaggtcaccttcccaggctctggatttgacagtaaccaatgttctagtttttcttgtcaatgggcatgttcagggcaacattgcccaaatgtgaactgagcccacctgtctagggttttctccaaaggtgaagacaaatagccgccaccaattccaatttgctttttgccattcctaatacttggcacttaggtaatctccctctcctactcttcatttaaatgtttacattctcccaaagtacctcaaatggtgtaatctggagaaaaataagtggcttaagatcacgggggctttgtgagttgggtactattacttccgttttacagatgaggaaactgaggcccggaaaggatatgtagtctgcctagtgccctgcttgaggaaccaaaatcagcatgggaactgactcctaagcaggtgcgcggttcatgctgctggaagaaatataaacaaattagaacagagagtaaggaaacgtaacattactttaggaatagattgggtccctgagacctcgtcatcagagaagacttcagaatccaagttttaaatagcattctagtgtttaccaagcacacaacattttgcaaagaaagctgaaatttttacttgggggtaaaaggctcaggaacaactggttttgcggccaaaggctttaaatgaaaagctaagcgttggccagctcaggttttatcttgcattgatcgtaatctgcaaggaagctaagaagctggccggccccgcgcctggagggtaggtggagagcggctgggtcctggccaagaagctggaaggcaggctcattccaggggccgcagcccccgggaagaagcagggggctggccgcgctgtggccctgcggggtcgaggagtctggtagcggacaggtttccagccttgtacaagccaccggcagcccgagagaagtcagtcggactcccatcgaacccggggcgcacgccagagggccggacgcagcgagtccttctgccccgcttcagcacgtgtcccatttcggttatctcattggctctattcagcccctctctgctccgctttggaaggctgccgcaggaccgccccgctgattggttcagaagctttggtgtgtcactctgactggtcgacagagttcacgccctctctcccgggtcataccataaagagaggaggggaaaacgcatgcatttcaggacttcgctttcgggttcccttgtcctgtgttgtgtaatgcccccgttatggcannnnnnnnnnnnnnnnnnnnnnnnnnnnnnnnnnnnnnnnnnnnnnnnnnnnnnnnnnnnnnnnnnnnnnnnnnnnnnnnnnnnnnnnnnnnnnnnnnnnnnnnnnnnnnnnnnnnnnnnnnnnnnnnnnnnnnnnnnnnnnnnnnnnnnnnnnnnnnnnnnnnnnnnnnnnnnnnnnnnnnnnnnnnnnnnnnnnnnnnnnnnnnnnnnnnnnnnnnnnnnnnnnnnnnnnnnnnnnnnnnnnnnnnnnnnnnnnnnnnnnnnnnnnnnnnnnnnnnnnnnnnnnnnnnnnnnnnnnnnnnnnnnnnnnnnnnnnnnnnnnnnnnnnnnnnnnnnnnnnnnnnnnnnnnnnnnnnnnnnnnnnnnnnnnnnnnnnnnnnnnnnnnnnnnnnnnnnnnnnnnnnnnnnnnnnnnnnnnnnnnnnnnnnnnnnnnnnnnnnnnnnnnnnnnnnnnnnnnnnnnnnnnnnnnnnnnnnnnnnnnnnnnnnnnnnnnnnnnnnnnnnnnnnnnnnnnnnnnnnnnnnnnnnnnnnnnnnnnnnnnnnnnnnnnnnnnnnnnnnnnnnnnnnnnnnnnnnnnnnnnnnnnnnnnnnnnnnnnnnnnnnnnnnnnncgaggggaccccttcttccccgaatcctgcgaccgagtagggtgcctcggtggccctgccggttcccacgctcggaaagtagcctctgtagtcactcacctcactcctaatactggatcttcgcaatttgctggcttcccctgaggggcccttctatttttagcacaccacacatctcacttccccaccctcgtctcacgttcagtgtccccatcccgccccggattccccgagtcctctccttctaccaggatttctacctctctcttttccgctccccacacaccccgccgcccgtttttttttttttttttcaagttaaatgttggacagaaaaaaggattcctttcttcttgtaggtggaataatcatatttatagagtgcttataatgaaccaaatgctggccgggcaattggcaggtgtcttatgaggattaaatgagttaatacatggggagtgcactgaacagtgcccagcacaaaggcagcgcccggttattattattgccacgatcatcatcattatcacctctatttaaacttctcactcctgtgaggcaggtcattattccaaataatgaagaaacccaggagcagttcaggggtggacctgcccttcaaatcccgatttgcaaacctgacattgtggagccaggtgcctggacccttgcccactcaatgacaaatattctcagagcccctccagctcggagctaggtttggagaggtaggtgggacacagaccctgccccagaggggttcctagtctggtgggggctgcccacctgtggatcagccccccctcccatttgaggtttgtttgcttgacccctggggctgttagtggcagtgtctttcctgatgagctgtgccctttctgagttaatcagtggccctctcccttcccccaagggatggcatggtggtgctctgagcacaagtgagttgcaacactgctgtgtgtcctctgtgggtgaagaggggataggaaagggcgcaggaagaggacatgggacagaggggttcctcttctaggctgagactggggccacacttgccatactccctgtgtgatcccgtttgcaggccttccctgcactctgagactcaggaagatggagcttatagagtcctgtgtttactgagtgcctactgtgagctggtgctctgccaaacaccctagagatgaggggtacccagggaatttacatggggtggggcctttgaggagttttcggcttaataggggagaaatgcataggaaaaccctccaatatctagtagaaagcaatccatattctaaaagataagcccatgataacaataatgattatcaagcaatcaagcaccatgggcctaacaccgagccggtaagtactgtctcattcctgtattatcatgggaaacgatctgccatcagagatatatgactgaaattacatttggtctaaatccagatttatgctctgaattatgaggcctcctgaattgagaggggaaagagaaagagcattttgcagctggttccctgggctcaagttacccctttgatacagcagctggccgcatgccctagacaggatttctcaacctcaccactattcgcatttggggctacattttggttgctgtggagtctgtcctgtgcactgtagaatgtttagcagcgtctctggcctttacccgctgcatgtcaggggcacccccggccctgacaattacgaaaaaaaccctggccctgacaggaaacacaagttcccagacattgtcagatgttacctgggggacaaaagtcacctccggttgagagccagtgctctagaggaacagctttgatgtttgatcacttgttcatttactcagtgaacatttagagcacacccgtgacatgccatgtctgcatttatggagaaacagtcgcagggcattttcagtgacatccctcagtgtcctacgtgtaaaactctagtcctgagaaaaaccgctgcttttgaggaacgggtataggagatgcttcttagtgttttcttttttgccttgagtgccaggaatctctgctagttttaaaaaatacccttgatacatgttttcttttagtttaatacatgtcaactgtgaaaagtacagataaggcaaaaaaatagaaaaatcacctggaattgtaccacacagaggtacccactgttaacattttgattcatgtcctttaactttccatgaatagatatgcttttaaaaaaaacctcatagaaacaagctcatctgcccatactttattgtagcttgttttttccctttatacacttgtctgccttacagtatgttcccaggccctggaactgtgtctggcacctggtaagcccttggcaaacatttagggaatgaatgaactaatcatgtgagcccttccttgtcaatcgatatttatcacggccagcctcaggacaatcaccataaagtgtggcctttataggtgggcccagggatggcagctggtgacaatgactgccatttacttttcatgtggattattttactcagcctctcagcaacctatgatgtaggggttaccacccccatttcacagattaaacaactgaggcccatggaaattaaggaaaacttgtccgaggccttgagctggtgaacaccaggcctcccaactgactgtctctttcctcctttaaccctgacttcctgtttttttctcaatcaactttaccatcagtatcctcagttctctttggaaacaggcaggatacagattaatagccagcccaggcatgtagtaggcttataagagttcacttctgttccttatttcttgtgccaagcccagacatgactccagctcagcccgtctgacatcagggggcttgtgggccggaattggttactaccgtgtcccctgcagtgatcctgggtggttttggactcttctcaggctacctgatggtttaattttcaaaatatcaaaagcacacaatgcttttcctagtctgcccagcccttggatgggcacagcttgccctgggtcgagggctggcatttcccaccattccttagacattctctgctcttgaactcctccaaccagtggctggggcagtgcctttggcctggaatgtcctgctggccacctcggtgagcccatccagtgctttgtggccttggcaaggcagcttctgtcccttcagtatcctcgtctgcaaaatggggatgattgtattaacagccacgtagcaggtggctgcaaggattagcggtgatgtgatcagtggtttcctggatgctggtaccgaatgcgtgctctgtgagtatttgagttggagaataattaaaacctgtgattatcatcacacttctaaagtagtgaaagcgccattgaggcagtgcttggcagtggcacccctgggagcagcctgcctcctgtgccctgcatctggcccggcacacagtaggcgttgaacggttgctgttgagatggtccagaacacagcatggcttggatcctggctccaactcttggcagctctgtggccccgggcaggttactcaccctctctgggctcccttatgttctcatatggaaaataaagatgacagtagtagtcacctcataggattgtcctgcgtgttaaatggtctcatacatggaaagcactttggagtgcccagcacctgaaatgctcagtaagtgctgctgtggttatgatgatccccctctcccaccaatgggcttcctggagtgatcatcttcgatcaggaatatcaagacagcagggcccagcagtgaaggatggtggcaggaggggaggtatggaactcagatgtcctcggtctcttctgtttattccaattaagtaccccagatgccaaacctcttctgttattattgttggtttgtttgtttgtttgttttggagacagagtctcactctgttgtccaggctggagtacagtgtcatgatctcagctcactacagcctcaacctcctgggctcagtcatcctcccacctcagcctcccaagtagctggaactacaggcgcacatcaccatacccagctaatttttgtattttttttttttcgtagagacggggtttcaccatgttggccaggatgatctcaacctcctgggctgaagtgatcctcctgcctcagcctcccaaagtgctgggattataggcgtgagccactgcgtccgaccttctgttagggttttgaccctgctcacctcaggggatgg

SEQ ID NO: 561 - DNA, 1890 bp, Homo sapiens
tggcgcggcggccggcgccaacgccaatgccgtggccctgggcggcctgccccccggcggcggctcgcacccgcagcactacggccgcctgcccgggaccatctggagctacacgcaggtgcggcgcacgggcggcggcggcgtggagaccgtgcagggccccggcgtgtcgtgggtgcaccccgacggcgtgggcgtgcagatcgacaccatcacgccggagatccgcgcgctctacaacgtgctggccaaggtgaagcgcgagcgcgacgagtataagcggaggtgggaggaggagctcgccaagcgcatgaaccttcagaccatggtggacacgctgcaggaggcagcacaggaggctgatgccatccaggaggagatgaatgagaagatcgagcggctcaaggccgagctggtggtgtttaaggggcttatgagtgaccccatgacagacctggacacaaagatccaagaaaaggccatgaaggtggacatggacatctgccgccgaatcgatatcacggccaagctgtgcgatgtcgcacagcagcggaactcagaagacgtgtccaagatcttccaggtggtccccaaaaagaaagagcgtaaggtggcttccgatgatgacatctctgagcaggacggggaggtgaaccggttctcggacgatgaggtcggctccatgaacatcaccgatgagatgaagcgcatgtttaaccagctgcgggagacctttgactttgacgacgactgtgacagcctgacgtgggaagagaatgaagacacgctgctgctctgggaggatttcaccaactgcaatccgaccatcgacctgcagggcgagcaagaggaaaacttgggcaacttgatccatgagaccgaatccttcttcaagacgagagacaaggagtaccaggaaacgataggtcagatcgagctcgagctggccacagccaaaagtgacatgaaccgacacctgcacgagtacatggagatgtgcagcatgaagcgaggcctggacgtgcagatggagacctgccgccggctcatcaaaggctccgcagacaggaattcaccgtcccccagctccgtggccagcagcgactcaggaagtacagatgagatccaggatgagttcgagcgcgaggcggatgtggagcccatggtcagctgatgactgaggccctgcgagcctggtggtcttggtgatggggccctgccacctctcctcatggggccaggaaggcccctcggagtggggttcgaagccacaccacacagactttctctgccctcccttctctggaggccctgagggactgctgcttccttccttccttccacaccaccaacgggtgccccgtctccatcccccacccacccaaggaatggtgctgtcaatttctattgttctccacattacaaatgcagacttctgtgcggactttgcagtgttaactgtgccttctcccttaagctgagccactttgagctccaaagaattattcctagcaggtgtttttatacagaactctaagctgagggccgggccaaccggccgtggtgtaatgtggtttctgccgtccgtcccacctgctcctctgattggccatgggctatgccctcccttcctcctgagccagcccagactcggcctggagcttggggtgctctgccaacccccaggaaggagccgcttgcctctgtgagctttctaggcctgggtagggaccaccccaattttctcactccctgaaggagagaaaggtggaaggaagggaaggaggacacattttaattttttggggggatcgagtggcaaagttgaagggacaaggcactgtgaggggaaggcagagcctcactgtgtttaaactactatgcaaaaaa

SEQ ID NO: 562 - protein, 285 aa, Homo sapiens
MNLQTMVDTLQEAAQEADAIQEEMNEKIERLKAELVVFKGLMSDPMTDLDTKIQEKAMKVDMDICRRIDITAKLCDVAQQRNSEDVSKIFQVVPKKKERKVASDDDISEQDGEVNRFSDDEVGSMNITDEMKRMFNQLRETFDFDDDCDSLTWEENEDTLLLWEDFTNCNPTIDLQGEQEENLGNLIHETESFFKTRDKEYQETIGQIELELATAKSDMNRHLHEYMEMCSMKRGLDVQMCRRLIKGSADRNSPSPSSVASSDSGSTDEIQDEFEREADVEPMVS

SEQ ID NO: 563 - DNA, 84252 bp, Mus musculus
  misc_feature (1)...(84252): n = A,T,C or G
ttaccacactcgcgtaaaatcctgagacatatttgccctcccagtgatgtgcagtactgagccctccattgcggatcagcagtggctgtcccagggtccagtaatgctgtctcattgcagttttgctgtgtcagatgactgcaggagcctgtgatgtgccctcaggcatcctgggggaccccctcacccggcacctcctgcacagaaagcagccagggcagtgactgctgtcagtggaatgtgacacagggacacagggggtataagggctcagtgagtcatcacatctggatcctttgggacagggtctggcttgttaagtgtaaatgactgaagccttaatcccagcacgcaggggacagagaggtaggcagatctctctgagtctgagggctgtctggtgtacaaagtgagctccaagacaggccaaggctgtgtaaagagacactgtctcagaattcaaaacagcagcagcagcaacaacaacaataaaagtgattgtcttcatttcttggtcctgtgataaaaaaaagaccctgttaaaagcaccttaaggaaaaaaaaggggtcaggcatggtggcgcatgcctttaatcccagcactcgggaggcagaggcaggcagatttctgagttcgaggccagcctggtctacaaagtgagttccaggacagccagggctatacagagaaagcctgtctagaaaaaacaaacaaacaaacaaacaaaaaaaccaaccaaacaaaaaaaaagtaaaagggctggagagatggctcagcggttaagaacacctgactgctcctccagagatcctgagttcaattcccagcaaccgcatgatggctcacaaccttaagaaaaagaagatttgtgagtctgagggtgttagtccatcaggtggagaaagtcctgactctggaccaagagtcaagaagcagagaagcagagaccaatgacttctggcatacaactttttctctctgacagtccaccaccgaagcaatggcgtagcccacagttgggggaggacattctacctccattaacccaatcaagataatctcttatacacatggtcagaggctaacccattctagataacccttcccaggatatagctatgattcaatagcttagtccaggtggccaggacccagttaggtcccccaaatgaccaggtgtgttttggaccagggagttggcattccctcttatcccatagggccaaactacttccctgcccactcaccatagctttcagtgttggctataaaatagttcccaagttaaaaattggcttcatggaggcctccagatcctcactgggaggagcctgcctatatcccacccctttgcagcttcacacctgcacccccatgcctgcacccgcagctattccctccttgggctaagagtaagatgagaacacctcttctccctccgatcccttcaacccaaatgctgtattgacctgcctctgagaggggaagtagatagcgtccccacagctggtgactgtcatcccactcttagggtggcagtggggaggatctttagtggaggctagcctgggctacagagtgagattcttcctctctcaaaacaaaaacacccagaccaaaccaaaccaaccagccagctggtggcctgaggggccatggagggactcctggtagaggagggggacagtgggcatgtgtctccttctccacagttttggaacacccaggtcacaataacgattactcctgagtgagtgcatctcttgggacaatgtagtattcatttcttccacatccaattagttgaaacaatggtcacactgtctgtctgagaatgaagagcaacactggctgttgtctcatctagtgacccagaaaatgccacagagtgttgggaggcagagcccactgtccctctgtgtcccctccgctctcccaggctatgtccaccctgaagctggaaggcctggaggctgcagggtacgtgatggacaggcttggtggtccaacagtatcatctactcaacatgttctagaattctccccttgtctttagcggcctctgtgataaagtcaatagaccttccttcaagtgaaccagactacgggctagagaggtggtttagcagttgacagcactggttgctctcgcagaggacccaggttcaaagcccagcacccacatagtggctcatgactgtctataactccaaaggatcctagccctcttctgacctctgtgggcacttcacatatgtagcacacagatatacatggaaacacatacacacatgagtacaaattgtaaaatttttgagagaaagagactggggggcgcgtgcgagagagagagagagagagagagagagagaacaaggaactaagtcattgtccagtactatccttctggccaggtacagttgagattccctacctcttagtgtctttccaggtaaccaggcatggttttgtaatggcctacatgacctagggccacttgatcttacattccttctcaagcagaggaaggcttaactcagaacagacgtcagcaatgctcacactcatcctacagacagaaatgcagagccgctcttacagatagcacagggaccctgagataaccgcggctagaaagagggtttcaggctgcctcacatgacataatccatgggagagggttacataaactttttatttgtagctgtttgggtgtgcaccatgcaggtgcagttctggaagaggccagacgggggcgccaggtcccctgaactggatttacagatggttatgaactgcctggtgtagggtgtgggaatatgaacaaggcggccctctgcaagaacagtaagtgctttttaccactgggcagaattctattttgttttgccattccttcatctgttgatgaacaatgaggttgacgcaaatctttgctataatgaaggaagggcagctaagtagtgtcttcttgtctccatcttggtgggaagccaatctcatggtgactgtgtagctcagcatcccatggggactccctcgaacaggcaccttcgtccgagacaactcatctctgtactggcctcacccaggaggaaaaagatagcacaggtcctgaaaccagggcaaaggtgaagtctagctggcagtcccaggaagagggaagtccctgagagaggaacacaggggacatacggaggcagctctctgtgatttgcactgtaacagagtgctagaagtatttgtttggtattggttgttcgtgagattggggggggggggtctcacgatttagccttggctggaattcattaggtagaccaggatgcccttgaacttagtgctgggattaaaggtgtgtgttactacattctgcttaatactatgttttctttgttagtttttgttggggggggggttcgagacagggtttctctgtgtagccctgactgtcctggaactcactctgcagaccaggctggcctcgaactcagaaatctacctgcctctgcctcccaagtgctgggattaaaggtatgtgccaccactgcccggttatatgttgggcttttaatagtatgtttaaccctgtttttctaaatattgtaattcccatgtggaatcaatttaggatcttggaaacaattcacatctttctttctatcctttctttctttctttctttctttctttctttcttcttttttggtgggaattttggtttaattatagcttttgaagtaggaaaatctgtcttcttttttttttggnnnnnnnnnnnnnnnnnnnnnnnnnnnnnnnnnnnnnnnnnnnnnnnnnnnnnnnnnnnnnnnnnnnnnnnnnnnnnnnnnnnnnnnnnnnnnnnnnnnnnnnnnnnnnnnnnnnnnnnnnnnnnnnnnnnnnnnnnnnnnnnnnnnnnnnnnnnnnnnnnnnnnnnnnnnnnnnnnnnnnnnnnnnnnnnnnnnnnnnnnnnnnnnnnnnnnnnnnnnnnnnnnnnnnnnnnnnnngacagggcatccctggggctgaacagctgaatcagactgagtccttgccaggtatgtgtccaggagtcacccattgtgtgctcagggccccctccccacaggcacctccgtgtccctaactgtggatgaggaatcagagggtttaacagcttttcatggcacaggaagaaggaagccagggaagccagaaagcccattggcttcctgctgagtggagataaatccaagggaaaaggaatggagggaaggagatggccaggatgtggggtgcctgacatttgaaaggatagacaggaaacaagtggtcattgatatgatgtttgactctccaggctgctggggagagaagcatcccagtagatggagggagctgatgtgcaaaggccctgaggtaggaactggcagtttgagaggcaagagtgacagccttaccaattacagcaaggacttgggtctttattctgagggagaaggaagcaaaagaaaagatggatatatatgtatgtatatatgtatatatgtatgtgtgtgtataataattttattttatataacatatattctattttataattttatttgcacatagttaactcatgtaaagtgtaagactgaaggcatggtggcacacaccttgaatcccagcacttgggaagcaggagaagacagatctctgtgagttcgagaccagacagggctatacgatgagtttttttttttaagatttatttattattatacataagtacactgtagctgtcttcagacacaccagggtgtcagatctcattgcgggtggttgtgagccaccatgtggttgctgggatttgaactcaagaccttcagaagagcagtcagtgctcttacccattgagccatctcgtcagctccaagatttattttattttatttatttatttttatttattttggtttttcgagacagggtttctctgtgtagccctggctgtcctggaactcactctgtagaccaggctggcctcgaactcagaaatttgcctgcctctgcctcccgagtgctgggattaaaggcgtgcgccaccacggcccagctgagattttgctttttaaaggtaaaatataaattaactgtaagatgcagtggcttttggcccagcgacagagtaggaagaagagtaacagagctcagccctcagcagtttctgccccttcctcagccctggaaaccattcagtgtctttctgtttgggttcagcaacatgattgttttgtgcatgcttggatgctcttgtgtctggcttctctcccttacaggtatcttctggattcatccatgtgcatcagagacttggtatcccttcttcctcacagaccacgttcaacacacccatttggctgctagatgccttaactgctgtggaacacaagaaaggaatcctgtgcacaggagttgctgtggatgtgttttctctctctctctctctctctctctctctctctctctctgggtacagacctggaaacggagcagggggctcatagggcccataggtctagtgccagagggtgcccacgaatgtatacatcctgttttttggtgtcctctgcaggattccttggtctcttcctctcttcctctgcaccggagatggatccagggccatttacaggttactaggcaaatgcatttttgatgagccaccctgtcctcttattacccttagaaatgggctctcactgagttgctagccttgaactcattctggaccctaggctggctttaatcttaagctccttttgcctcaacctcccaaatagctggattggcatgcctggctcctagctgtgttttgattgtggaaagttctgtactgaaggcctcctctgacagggtcttctttttgtacatgactaacactctctctctctctctctctctctctctctctctctctctctctctctctctcaccttgcgctggttagttttgtcaatttgatacaaactagagtcacacaggaagagggatctgttccatcagattagcctgagggcaatagtgtactttttctggatttatgattgatggtggaagagtccagcttcctgtgggtgggaccactcctggtcacccggtcggtcctgagatgtataacaaagtaaactgagcaagccgtgaggagcaagccaggaagcagtatctatccatggcttctgctttagttcctgcctccaggttcctgctctgagttcctgcgttggcttcccctaatgacagactttcactcataagctgaaagaaaacgactcttccccaagttgcctttggtcagtgttttatcacagcaagagaaagcaaaccaggacagacttttcctggtggacttcccctacaggccttctctgccgcccgagcagaattgatcgaccttcctcccatctccgagaccatcctgtgttgtctccctagctccccccatcaaggccatggctctgtcatatgggctgtctgtgtgtcatccaatgacagtgtagcctgtccccaaagcctggccctggccttgggctctctgaggtaagcatcacgtaggtttggaccttgaagacttggcaacaatttggactgcgtgagttgatcaaggcaagtgggtatcaaggaaaggggggtggcagacttgagctttcagctgactggcaaactcccagggccactggcagcatcagcgggagaaaacaagccaggactgaaagatgttgaaggcctcaaggaaattttatttttaaaaagttgattttttgttttgttttgtttgttttgttttgtttttcaagagacagggtttctctgtgtagctctggctgtcctggaactcactctgtagaccaggctggcctcaaactcagaaatctgcctgcctctgcctcccaagtgctgggactaaaggcgtgtgccaccactgcccgacttgttttatttcttaaacaaggtttcactatgtagccctggctaagcagaccagaaatctacctcgtactcccagaaatccacctgcctctgcctccttagtggtagcattaagagtgtacattgccatgcctggctccattatttattttgtgtgtttgaaccttggaggtcagaggacaacttgagggagtgagttctaggggccagggatatattgatactcaaaaagaaccagcttctccgatggagaagtagctcacggattaagagccctggctgctctcccacagggtctgaatctgcttcctggcacccacacggtggctcacaactgcctgtaacttcggtttcaggagaactgccgctttctcctggctttgtgaaactgcacaaatacacaaaaatttttaaaagatcataaaaaaaacctctctctttagagagataaataaaaccatttcaactgaacagaccacttactttcttttcttttgatttgaattttattgactattattattgagtgtggggttaccatggcaaccggatctgttctcgccatccctcatgggttcttggattcccgattcaggtcttcaggcttgtgtgacaagtgtctttccttgctgagccacctcaccagcccttttctttggcttgagataggagttcatgtagccttgattggccttgaacttctgtttctttgacctcttccttccaagtgctgggatcacaggggtgctcgccatgcctgtaaagacccccatttccaacaaattggacacgaaggccttctttgatgagtaggcttcaggctgaaacttgagagaggaggagtcaggcactgaggatctagagaattccttcataataatcatggctgagaaaacccagtccctctggtctgagatgacatcagctccctttggataacctcctgcagaccagatctctaggatttcgctgcctcattcggcctcctcctaggtcacatagaatggcccagtagtgacatcagataccccggggttaacactcctaaagaatacgggccactcaggttcccgttcaaatctagaaggtctcctctttgggaccacctttagcaaacatgtccctgagcaccacgtagtttctggagagactttcagccccactccccccacctcccatctccatcatcaggggcacagagtgggagcaggttcagaggaacctgggctgtgaggactcccaccccgagtcctgaggaccctcttctgtaaggtggaggtgtgaactgctcttcttaaagccagttggtcgctcatgagcctctgaacttggaacatgcgcgggtgtaacacagccaatgttcccaggccccgcccacccctgctcctttgtctactgaacttctaggctcctttctgtctttctcctgtgtctacacgtgtgcatgtttgtgggtgcacctgaatgtgttgtgtgagacagaatatcttactaggaaccgggttagagaagtctggctggccatctggccccagggatctttcttcctgtccctgactcccctgcactggaactaccagcctagagtttgtttttgttttggacttacttattttatgtgtgcaattgtctttcctacatgtctgtctgggtaccatgggcatgcgtggtatactcagaggtcagaggaggggcatcagatcccttggaactgaagttaaggatggctgtgagctgtcatgtgggttctggggactgaacccaggtcctctgcaagagcagcaagtgctcttaaccactgagccatgtctacctctgagccatctcttcaggcctgggtatctcacctgaacacggatgctggcgaccaatatcaggtgtcaagcactctaccaatacggtcctttgcacagctaagtcttgattccatgtgatgggtggaatctgtcagggctggaaatatgacttggctgtctctggagaacctactctgactcaatatgagctaactctgggtcatattgctgaaggtggtcttcaagagcagtcctactgggttttaacaggagctgggactcggttttaacaggtgtggggctgggttttctcagctccgtatccactttttgtgtcctgagtggaatgcaggccttggcctcactgaggaaggaagtcaccccatgcctcagggttttttttttttttttttttttttttttttttttttttttggctgtaacacgaagcatttagaattaaaggcttaaaggctctggctgtggtctgagaacgagctaactgggcactgggcagagcagggaaagacagagtccctaccaccctgctggtatcctgagtggggttcatggccaaagaacgcataactgagctcaactgagctggtggtgtctctgggtgataaggaagagtcagcagagagcatagccgccaggcagtctgataagcccctcgaacacattcctggatggagtcaggggcccagcgcgtgtctggggcctggagttttgagtggagggtatgcttaaggcctcgagggacacagaattctgtacgaagggtgtgcaaaggtcccgggagacatggaattccgaggggacagtgtgcaaaggccacgagggacacagaatggagggtgtgcaaaagcccaaagggatatggaattccgagtgggggaagtgcaaagggccccgagggacacggaattttgagtggagggcgttcatggcccagaggctggcccgggctgactgcaactgattttaatgcaggggagcgggaggcattcgcaggagtccggaagaaagaagaggtcgcaggggcgggggtagtggatgcagacggtgccagggtcttctgccctctgtagagggcacatcggttcccacctagaccagcaaccaccaggaaagcccagcagctcggaggggcggcgcccaaaggaagccacgcccacgcctcaccatcagagcaccgcccactccccgcctcttcccacccctcgccggaatcccgcgccgaactcgggggcgggctgcccgggccatggcgcataaagcctctggccacctgcagggctactgctgctccggccaccgccaggcacacaccttgctgctgagggagtctcggcttctgtcatctctgtggcctccgtcacctctgtctccgtctccttcaggtcctgagccccgagagccccttccgcgcacgcggacatgggcggcagctccagggcgcgctgggtggccttggggttgggcgccctggggctgctgtttgctgcgctcggcgttgtcatgatcctcatggtgccctccctcatcaagcagcaggtgctcaaggtgagtgaagtgtcttggggagatgggggttggggatcgggacgcagggtgggacggtggagctacctcctcaccaccagggaggcccaggctcaccccagaggcttggtctgagtcaccagcgtcccaggagcctaaacctcactgaagcagaagtatggcctggttgtccctgagtttcgactgtagctgtcgcgacctccagcccttctgaacgcgccggccggtgactgtacctagtaacctcagagctgcgcgaaacccctgtacatctgtgaggctcccacgggctccagttctttgggtgctctgcctgtttcctcccgcccagatgccccagagatgccctggctcgcccccacactgcctgccagtctccgagagttaagctgctttctgccccccacgctctggcagaggtagacacgactcaggtctgccgaggataggcagcccagcctctcccttgatctcagccttaggccctgttttgccctttcaaccgggcaccgatattaggcgggtggtgccggtccagccacagactctgccctgggatccggtgtccttctatttgagccgggagctcattaagtcctggagattaccgagtaattgtgttttctgagacgcagggttactgcggaaggggaaacgggggctggctctcagggaacatccagttagaactggatctgggatccagaaggggctgttgtcacagggtttgactgacatctttcctcttagcgggtttgtttactgggagtttaagaatggcttcgtgtcccatgtcccatcgcccgctgaaaggagggaatgaatgagggatactccctcttgggctggccgctacctgccaggtcctggcgggtcttcaggatggagccacaggtggctttcctggagttgtggtgggtatttccgagttctcttggccacactgtcatttctcttgcttagaattttcaacccttgtacatgaaggtcccaggagttgccctgtcttgggtagagggaagatccttcttgttggagcatcagaattgctctgggcctttctgttaggtttggcaaagtagtggtgacagccttgtctcagtggcagcctgtggtttcagtaagaacccagccctgtgcactccgcacgtggactgggtttcctgctcagccagcctgtagtgggtagagtgagcagatatcccctgttcttcgatttgggggtgagggggaatctgagctggttccttctcaaactcctttcgggaatgttttcttttgggggttggcacagagactaaggatgggggggggttggtgtgtgtgggcgtgcacgttagcgttgggactgcgcaggcctgctccatcagtcagggtcccatctgcccgtgcttgagaaagaccacgactggcagaattgccccatagctggtagcttggggcttcacgtttgagcgagcggcttccacaatcttacttgtgaaaatcccaaaggcgattggttgggggctgagtggcgtgaaggaaggaagagcctaagacacgcctagcccaaaacagcctcttcttagaggccctggctggaagccgacctcttgagggaggaaaaaaaagttcacttcaggggatggtgggaggatggcagcgaggggagcagggagggaccctggagttgactttggattcttgcgttctgtgctacttgaatggaagccttgtctttgtgtgtgtgtgtgtgtgtgtgtgtgtgtttctttctttcctttttttttttttgtaagttaaagaagttgatttataaaagtcaggaatactaggttgtttaagaaaacaagttcaggacttggggtgtagctcagtggtagagaacttaccttgcattcaacaggccttgggttccaacacacacacacacacctgcattcaacggggttccaacacacacacacacacagagagagagagagagagagagagagatttcactcttattttcttctgatgatatcattttttgacataaattgtgtgtgtgtgtgtgtgtgtgtgtgtgtgtgtgtgtgtaggtcacctgatttcttcccttacagatagggtctcttgatgagctagacagccatccccctgtctctggggttacaggtgcaatcctatcgatgcacaatattgtatatgtcactgggagtttgaactcaggtcctcatgtttgcctagcgtggacatcttttacaaaacccgagttggatagtatgtggttttcttcttttcttcctcctttctttccttcctttcttcttcttttttctcctttctcttgattcgtggtctcactagatagcccaggaactcagtgcatagtccaggctggcctcaaactcagagatccacctacctttgcctcttgagtgttaggattaaaggtctgtctaccatgcctggcttaaatagtatggtttttctgttcagtgttagtattcaaaggggtgtgtgtatgcctgtgtgtgtatgtgtgtatacacgcacacgtgtacacacacatacatgcacgtatactcatgcacctgtatggacgtgcttgccacgcggtgagaccagaggttgaagtgcagtgtcttccacagtgtctctccaccttatttttttgagacaggctctctcattaaatatgaggtgtgccttctctgctagccactgaacaacaggtccctggaatctgcctgtctccgcctgtcctggtactggggttccagacatgtatcagacgtgctcagctatttttttttctgcgtgtccctggccatcctagaactccctctgtaggctctccctgcctcctgagtgctgagactaaaggtataggccaccacccctggctctgtgttgagcttttgtttgggttttgagaatcagaactcagatcctccagcgagcactttacccactgggcgatcttcccagcccctttcaaaggttttgacaggccgaacatgccaagtctgttactgccttttccccccttactgtgctgggattcctttgtttacagttcctctgttgactggccatgtctttgtctcagactccagagaacacatagcgtcctgtgtgagtccaggaacacttgcacggtctgagccttagctgtggacccacaggtgcgctctgtttggaatttggaattctctactattgctcccgctgtcaagctgtgggaccatccacttcgatggcaatgaagtgtcatttctaaaccccatcaccctctttggctacctgtggttttgatttcacatcttcagcgccacaaggttgggcaggaggaacgtgatccccgtgtaggtgacagttttcagagctcaggggctcaggcctactgtaccatgtgctagctggagccggttcatcactcaagagagccaagtttttcccccagcagtgagacaggggtcagatctggtttgctgtccctgagggattagcaagttgcaaaggagattacaagcggcctttggaaatgccctgtgagcttgcctgcttctggactcaatctaaccacggcagcgttgtgaaacaggcagaggctgcgaattcttcctctctacagataagggatctggcccatagcaaaggtcggcagctggttattaaacatggcctgtggtgggctgggagggacttcaagcggccatgctcggtttaccttccatagggaagtaggaagcaagcaagagccctctctttctgtacagtgagctgctgggcagtccaagaaaagaattaagaagggccaggtttcaggaagacatgcatgatagaaaaaaggctctgttactattaaagtccctcttccccagcctcttacccggcatcccagctacttggagtctgaggcaggaggaatgaatattcaaagccggaggaagttcagagcctgcctgggttgcacaggaagctcaggggagcttagtgagacccctgtctttatatcaaatgtaagcaaggtgcattagtgcatatttttaaatcccagcgctcagaaggcagaggcaggcagatctctgagtcaagtcaagtgcctggatagccagggctatagagagagatcctgtctcataaagaaacaaacacacaaataaataacacataaataagtaagtaaataaataaataggtaagtggaaaactgaagatagagctcactgattgatagactgcttcccagtatgtgcacatccctgggttcaatccccagcactgcaaaacataaagagaaacacacacacacacacacacacacacacacacacacacacaccaaaatccctcagccagtcggtggtcgcagcggcggctcatacctttaatcccagcactcgggaggcagagacagagtgatctctgtgtcagccagggttacacagagaaaccctgtctcaagacaaaacaagtcaaccaaccaaccaaacccaaaatgacaagaatgacatcaaaaccctaacagtattctatattttcaacagactcgtgttagtgccaaaatggtttagaaaaaggtgcggaagggtgcgtgccagacacacaaggtagataatgctggctgcacgactctctgtacatttttgttttattttatgtgtaggggtgtttttcctgcatgtacctctgtgcatgcagtgcccttgtagaccagacaggacatcagatcctctggaacttggacttacagatggttgtgagccaccatgagggtgctaggaatttcacgaacccaggtcctgtatcagagcggccagcctggctcttaaccaccgagcaatctccaaaccatcatgattctttttgtaaaatattatgtgtatgtatttgttggtgtgtgagtggaggggtggtgctgcaacatgcctgtgcaggtcatgggacaactttgaggagtgatttctctcctgctcctaagtggggtcctagggatcgaactcaggtcgtcaggctgccgagccgtctcactgagcccaatggttactatcttgtttgtagttctttagggcaaggtttcgttgtattactcaggctttatttgaaatcctcctgcctcagcttcttgttcatcactgttcatcatggaagggagtcagggcaggaactagaacaagggagggacctggaggcaggagctggtgcagagaccatggagggatgctgctacgaactttctctttatgacttgctcagcttgctttcttacagaaccgaggaccaccagctctggggagacccctcccacaataggccacgcccttccccatcaatcactaattaagaaaatgttctacaggcttgcccatcgcccagtctttttttttttaatatttacttatttatttaatgtatatgagtacaccgtagctgtcttcagacacaccagaagagggcgtcagatctcattacagatggttatgaaccaccatgtggttgctgggaattgaactcacgacctctggaagaacagtcagtgctcctaaccactgagccatctctccagcccccccccccccagtcttatggaggaatttgtcttaattgaggttacctcctctcaaatgacaatagactgtgtcaagttgacgcaaagctagccggcataggcagcgtagttgacacaggtccttgtcagttaaggaaacagctgaaaatggtaagaagtaccccgtgactttcttggagtgtgtgtaagtgtcacacggagggaaacccaccagccctggaaaccctgtgtgtctcacctagaacccagcctggcacgcggcttgcccgtccacagggccaccgccttcagcacagagcctcataatctttcccaagtctgggactgtatcagctccactgtcctgacttggcatttcctgttgcactgtgcgtgatctgttcatctgctgatgcctccctcctctgtcccatgtgtcccctaggtgcaaagtggaagcctcaggctgccctcacctgctccgttgttctttctgctacctcatacctgcttcaccattaccttttatgacccctctacccccatggccttactgcctgcttggacccgtgtggtagtctatcctgctcttctagtgagggatggtgcccaccctgctcagactctctaacattcccgtctttttctgagtgaaccccaaattcctctcagcagcttgaaggctcccaatttgtttctctttcccaccctcaattcagcaccccacccccacaccactatgctcctggtttgagcccattagacctagtccctcttcagaggccctggcgtgtccctttggtggcacatgcctttaattcccagcacttggaaggcagagaggtaggtggatctctgagttcaaggccagcctggtctatagagtgggttttatgacagccagggctacacagagaaaccctgtctcaaaacgccctatccccctaaaaaaatgatttatttattattttcagtgttttgtctgtattcacgtgtgtggtgcttgaggagggtcaaaagaggtgtcaggattccctggaactgtgacctgtcatgtgggtgctgggaaccgaactcagattctctatgggtgcagccagtgcttgtaaacctcggagccatccctccagcccaccatccttattctgtcacaggcttggatgtggctcgctctttttcctgattgagaagttggtcagccaggtgaagggctagggagctgactggatgctggccaatagctggctctctacccctccttgcctcaattctaatctgatcccttctcccacagctaggagttgggctagcctgggatatctactctgttcctgagttgttttgtgacctctggcagagcccattggcttgacacttggaaggtgtccctgatggcagatagctccttgtagatagatactgtgttacgatgctcctcagagccttttattaagtatctaaacgactacagttgctctctgcttcatctagggagagggacacaaagagagattaagtaaaacttgtcccctggtgtcccatgtctccccaccccaaccctctacctccgcattccagatttaggtgacagaaccaagatgtagcctctgctaaaagattgtaacccttgaacagctggccttgactggccgttccttctttttctcccttctcttccatcgatgtgcatggctagcgggtgtattccagggttttctcccacaagagaaggctgcagattcagcaccccttggtacctcctcaggaggactcttaagtgggaaggtctgccttttcccagtttgtaccaccctgtgaccttgggatcaaggtctgcctgggccatcgtgggctgctccccaagtggagactggggccccagatgtcaggatgggtgtccctgcaagttccctgttctctgggccctgggtaagaatgcttgggtgtgctgggatttcttctgttttcttcctctttcctgatgcctggtttccggttcccatggcttccggtccccctggcatgtgtggaactattttagttcccttcagggtgcagctgtggctatagactacctatttttagtcccaagcatttatttctgttcctttctggctcctcgtacatccacaagtcctcatagcttcagtgtgtgtgtctgttggtatacacaccttttggtgcgggtccacgtaatagtgtcccccaggtatagtagcacacagacagagcttggtgtatgtatggtccagtgctgacatccatggatgtgagtgtttctgtgtaccgcacgagctacaacctatccacatggagaaaagccaggaaggggatgcaggcacatgggtcattgtctgggcccatgtagacacatgcacatatgttgatgcctgttccatttgctgggggtgggcagtggacatggctgcatggcagaatgatggccttcgaggtgcaagccactgggctccgaccttagcactgcagcagacagaaggggtcacgggcactgcatggtcactgtgtgcagtagttaggtgctggtattttgaagccagactctcctgttgcattcctggaaggaagttaccctgggacccttcctggaaggatggattctttgctatcttcccacagtgactcatcccctcattcgctccaattcctggagttcggctacccggaatcctgttctctggccttggatcccagcagccgactctggggccagtcctggagagagccacttggttctctgcagagcttatcctaggtgcatcttggttcctaggaggcttggcccaggctgccagctgctgtggccttctgtggcttttagggtacagaggagtattcaaatgtccttccttggccagcaaaagagaggccccgggctaccgtgagnnnnnnnnnnnnnnnnnnnnnnnnnnnnnnnnnnnnnnnnnnnnnnnnnnnnnnnnnnnnnnnnnnnnnnnnnnnnnnnnnnnnnnnnnnnnnnnnnnnnnnnnnnnnnnnnnnnnnnnnnnnnnnnnnnnnnnnnnnnnnnnnnnnnnnnnnagaagaaaacatggatgctcttgggtatagtggaggagaaggtttattgtagataaaagggagaacgggagaacatagctagaggcagagaccgctggaagagtccagagtggacatgaccttgaaccctgagctagatgaggggagggggagggaaaaggagaggagagaggggagccaggtgcaactgccaagaaggagggagggcaatcaaaatggttggattatcctggggagagtagcccagccctctgggctatagagttcagggtagggggcagggtatgccagcctgaaggggttctgaaactggtagggactgagggatgctgggacgtggcagccaggtctgctttgatatgttaactagccacctaaaccatttgtgcaaggtttgaaactcaataccttcagtgccagatcctgtgccatcaatttagtttgaggaggatttagcctggcaggggtgggtgggggtgtaggtggggctctgcccaaaatagaaacaggttaggaggctaaagcagggggattgctagttctaggccagcctgggctaccctccccccaaaataaataaaaaaaattccataaaaatgaaaaaccagaaaacaaaaacacttgatccttttacctctctcctctctcctcactctctccctcactggtgaccttggcctccactggcctagggcagggtcaggccaggctgagctacaaagagaaacaacaacaacaaaaaaacccaggtctggctcagcctggctctgagtcccagtggctgaggaggttccatggctgccgagggaagatttccacccctctcctcagatcccggnnnnnnnnnnnnnnnnnnnnnnnnnnnnnnnnnnnnnnnnnnnnnnnnnnnnnnnnnnnnnnnnnnnnnnnnnnnnnnnnnnnnnnnnnnnnnnnnnnnnnnnnnnnnnnnnnnnnnnnnnnnnnnnnnnnnnnnnnnnnnnnnnnnnnnnnnnnnnnnnnnnnnnnnnnnnnnnnnnnnnnnnnnnnnnnnnnnnnnnnnnnnnnnnnnnnnnnnnnnnnnnnnnnnnnnccccaaactgtcccctcctgggccttgacctcaaaggagtctggtgtgccaggtggctcatctttttcctgaccttccccttcaactccaggcctgtcccccttcaccttcctggttagcttggcctgtggtcttctagcttgtggcggcagcaagccacgaccttggcagcggccttccctcgccctctctgcttcccacacgtgagccctggggaagtgagcgtctcccacctttttgtccgtttcccgaggctgacttctgtcattttcttatctggatccttaaattcctttcctctgtctcttgtgttcctcccagctcccagtacagcagccagaaacagaccctaggtccttcccatgtgtcaagaggccagtaccttgccctctgatacctttctggcttgcacaccccaccccttgattcctctcgtgcgtgggctaggtctatagtctaatgtctgacatttccaagtgggactccgctgaggtcaattcagacccaatatgccacactagttacatgtacattgggcttttttccttctgccacgttgtccccatggggagtccccaggctcaggagggcaaggacctctgtggtgtttgttctttgtccccagcgttggaactgatgccagacactgggccttgggttcccaaatgtttacccaaagtggacagggtcgaatcacagggtgttctggtaccctggcactaggaagtcctgtgccaggctagaccatgggtgccgtggtgctactgtcctgccatgggtgatccggctgatccggcacttccccctgtcacagacagagtgctctttcgaagacacagtgctttagtttaaagctgtttcaggatccagctaggtgagatgatgtggatttgatccccagagcccacgtcaaacaagctggtaattccatccctggggaggcagagacaggagactccatggggctcccgggattcattcctgcaacgcaactggggagctccaggctttagaaagaatcgatcttaaaaaaaaagatagatagtgctggagggagcacacctgaggttggattggcctctggcctctacatatatacatacacacacacacacacacacacacacacacagagagagagagggagagagagagacccacacccacagaggcagacagacagacaaacacacacacccagagagacagacagacacacacaaagagccaaacacatacacccacagagacacacacatagagacatacatgcacacagaggcatagagaaagatagacacacacacacacacacagagacggaggagagacatatagagacacacacacacacacacacacacagacacacatacaaagacagacagacagacagacagacacacgcacacactcactcactcttgccccgatccatcagtcctttcttcacaggctccaacctgtctggccagtcagcggttctgttctaagcccacaagtctctctcctcctccattctcacatgcgccggaagttccttctgcccagatacttttccccttggctctttcactcagttcctctcctgtgtttcaaaataaatgacacgtatttgtattttggggtgcttgggagggacacagagaggcactcatactagacaagtgttctcacaccagtacacccaaagcctgtgtggggatgtttttgaagacacttcctggtcccagcttccctgacctcccttgacctttggaagtttccttgcgcccatctctagtgaactcattcctttggttgatgtcctaccaggatggggatctggtgtgttttgtacatagctttactcctgcagtggtggcctggctggggtgggaccctagcagccatcgctgaggtcacaagccttgctgactgcctctgctccattggggggggggggggctgtgcctctgttttgcttttttgtttttgtttttttgtttttgtttttgtttttgtttttttttttttttggtttttcgagacagggtttctctgtgtagccctggctgtcctggaactcactttgtagaccaggttggccttgaactcagaaatctgcctgcctctgcctcccgagtgctgggattaaaggcgtgcgccaccactgcccagcaagggctgtgcctctgtctccagggggctgcctcctgatgccactacctaagcctcagaccatgagcctctgtcccctggatgccatttcttgaagccacctgggtgagttggtgttcatatgtcccagaccacacccactggcccgagtctctggcaggtgaccctagatccagggtctgagtctctgcatgttttctcttgactccagcaacttctcactggtgtctgtgccagggctgctggcttcccccagtaacctcttcctgtcccaccacaaaggcagtggaccagaaggaagagacccagttctcagccatgtcatcgggatggctgtgggcggtggataaataaatcacacctgtcttagccaagggcgggagagaccaggaggtggggtgcaggtttgcaatgcacggccttcgggagtgaacgggagtcttcagcagccttggtttgacgtggtccgtgtacagtcctccgcaggggacaagtttaggtttatgaataaagcgaagtcacttcctccccggagttccagataacctgccccagtgcgggatgcagtgcgggatgcagtgcggggtgcagtggacagctgctttctcctgccagtgatctatatagaaggacctgggaggtgtggctcacaggtgcgaagaacaaaaataaactgggtgccattacacacctgtaatcctggcattccagaggcgaaaacaagagaaccaggtgttaagtcatcctgactacagagggaattggaggccagccctggctaaagaggctgtctaaagggttcagtgagtaatgcttgccaccaagcctgttgattggcgttcgatcctgggacccacacagtggaagaaaagaacaggctctttcaagttgtcctctgaccgctgtgggtgtacctcaggcacattcacactcctcacacatacactcaaataacaaatgcaaaaaacaataacaaatgcaaagcaatgacgttaagggctgggagaagggggcggggcttggggctgtccattgcctctgattggcttaggtcacatgctcatgtttgagccaatcagtgtgtgtcaagaaagctttctttggaaagaggcgctctctctgaggactcaggaggggatggagcgatgttctatgggttggcaggaggcaagggagacaggtagccagagtaaggacagaacccttggcccctagttagcaccggatcaccccaggttccgctcgctgcctcttatgtacgtacatgggtgctttttttgacgctggctccaggcttttttgattggggaggcagcgcgccagggtaaattttataaatcttaggttgttgggtcttcaagtacttacttgggtttctctctttttattttatttcattcttatcctcattgttattttggttttttgaaacagggtttctctatgtagtcctggctggcctggaacttactttgtagaccaggctgtcctcgaactcatagagatccatctgcctctacctccctcctgagtgctaggattagagtatttcaccacgcccagattttgctacgggctacggctgcttctgcttctccttcctatttattattattattattattattattattattattattattatttgaggcaggggctcacactgtagcccaggctggcctcacacttttggcaatccttctgcctctgcttcccaaatcctgggagtaaagacatgtgccgtagtgcctggcccatctttttgtttgttaaaatcacatgtttgtttatttgtgtgtattgtggagggtaggggtgccatatgtgtactacacatgtgtagagggcagaggacaacttgcaagagtcagttttcttcttctaccattatgcatggggttgaactcaggcaggcttggctgctggggctttattggctaagtcatctctcctgccctcatgcttttgtttttgtttttattttgtttcttgagactgggtttctctgtgtagccctgactgtcttagaactcaatcagtagaccaggctggcctcgaactcacagagatctgtctgcctctgcctcccaagtgctggaattaaatgtgtgtgccatcaccgcccagcttagcgcctgtgttttatttttctctttaaggacccagatctcagagggagctgtgatctgttcaaggccatagttggtagccagtgttagctggtcgtgggccaggttaactgccaggctggccggggaagtggggtgctgggctagggaaagataagagatctcggtaagtgagggctagtcatgttgttttctggtgacttcgggcagtctcccagctccctcccacctacctcttctttgctctcatctgactgtaggagtgggaggaggtgttttgataaagtaggagagatgtcaggacccggtataccaaagttcaagctctatgcgccttctctgaggctctgagtgcgccgtaggatgcaaacagcgagaaccagcccaagcctccgcgcccttcactacactcggcatcaggctcagatgcagaggaggtaatctgctctggacgtgttctgcaatatagctcaggagtcggctcacgccccagacagagcagctgttggctcttacccaagactctgaggtacgccatgtccttctggagcagtatggggactgaagctgagcttctgctagtgtctctttgtaagccgagctgggctctctggctacccacatgtttgccgtctgcctggaggagaggtgggaggtgagtgtgttcctggagggtcactgccaaggttgtaaacccattggaaagtctctgggcttgagccttgcgggggatggctctgccaattccctgctgggtaacctcgggcaagtgccttaattcctctgtgccttttcaccgtgttcttaatagtgtcctgtgtctgaggagatcatacctgttaaacacctagaataacaagctgctgagtatcgctcagtatgctgatgcacacatcctcggggacctgtcatcaatgcttgcaactgacttctcttctacatcctgctctgagatgtcacagggcatgctcatggcacacccagctttcccaccagccttaagagtggctggggatgtctcaagactgattctgcagttgcccaagtaccttgctggctagccatgtcccagtaaactcagccaccggctgttctccctccccacgtctaggtttttcttttaaaaattattgttttggaaaaatcgctgacacaatgggacagtgggtcacattggcactcacccaaacctcttggccctgcagagaatgtgcgtagacctctgttagagtcaaggtcacttatcctcctgcccacagcctgcagctacaggctggcccctgtgtgtgaggcctctgcctccagctctgtcctttttccattcaaatctgtcttacttattttctgccagggtaggaactgaacctggggtctcctgcttgatgtgccatatccccagtcctttctccttaaaaacctttttacacttatttatttaaagatttttttttaaattatgtgtctttgtgtgggtatgtgcacatgagtgcaggtgcctgtggaggccacatgaaggcgccagatcccctggagcaagagttctagtgagccacctgactatagggtactggaaatggaacttagggtctctgcaatagcactccatgcttttaactgctaagcggtctctctggcccttatttttgtttgtttgtttgtttgtttgtatagcgattagaggacatccctagtttgtcagttcccttttctgtcatgttgacagcaagcacctttacttgctgagccattttgaaagcccaactctttcctaatattattattaaagttagtctcactaagtgtcccaggctagccttggatgttcagtcctcctgctttagcctggggtggcaggcttgcccacagagtccatatttggttgtagctgttaagtttagaggtttgtcctgtgtggatctccttcctcctatcagtggtacaaccaggcctctcttgccacctgttctgcaagccttgtttcccaggagctgatggccaccttctaggcagggcgccctggttgtggttgctatgtgctcttcccacagaccctgcacataaactgcctagggttatcctggctgagcaggcagtgcgagcagcggggcttagagtttcttgcaccagcttctgcttgagtttcctggctttcccagccccacctccatgttcggagaggtgttgatccctctgacgaccaggctgaggccagctcagggctcccacccacccttgcagctgtaggagtcctggcatgtcagagctggccttctggagttggaggcccaggaaggtgggacctgggggctcatcctgctctgctccctaccgccaccccaacccccatcctgacctctgagccctgcagaaattctaagccctggccctggtcccctcatctggcctcttagcccaggaggctcccctgggctgagagcccatcttagccagtgctccattgtagctggggtcctgaccggcgctggcctcgggatctccttctcctgtctgttcccagccctcactgtgcctcttgcgcttcctttcttattattgtgaaatagtacaaagttctaacaaaggtcataatacacatccgtcaggttaaatcagccccaggtgaaaagatggagcctcatggtcccgaggccctgctggagggagccaccacccttgggtgctccttgccttttgtagaaccatccctatatatccgacttggtctggttttgaacttcctttagtgtctacaaactctgactttattgctgtggcattttgctttcgttgctttgtttgtttgtttgtttggagaccaagcctgctctgtagctcagactaacctggtatcagtctttctgtctcagtctctggcatgcaaggcccacagatgcgcaccgccaagcctgaccacatttgcatcctggctgtggcccgtttttttcaagttcatctatgtaatagcgtatacctgtgcctcctaactctctgtgactggacaatgttttgtgtgtgtgtgcggtttttaatggtatagatgtcacattgtgtttatctgtctttagccggtggcagcaggtagctagtggctcttgtgggtgtggggagcgtggtgctgtggggtgtggacacatgctcacttgtcatgtcctctctctctccttccctgtctcctcctgtcagtgtctccctctgtggctcatcctctctctggcttcgatcttgagtacgttcttccatctgcttcagtcccatccatccacatcactgtgggtgagagcttacgttccgaggccttgggctggggtccaggtgttggctcagccttctcccagctatgtgacctagtgccgttggctcacctctctgccttaggtgacttgctttaccaggccatcatcgtgaaaggccatcagctgtgtgacttaagcaacatccgcttcctttctggctcttctggaggctgcatgcccttggctgccatggctgctcctgctgtctagcttgcagccactgcctgcctttccctgtctccctgctgctatcctcagtatctctctcctagctcttcttgctgtagactccggtcacaccgcatcagggaccatcctgactaatttattgcctcctttttttttttaacctactgtggccccatcatgggctctgaatccagtacattccaatacagtttgaggcatgggggtggggtagacaggtgggagtggttcggcacctggaacgcttcaggcaatgacgctatgtggacaccttgaaatcagagtctctgtgattagtggctgggacccttgaaagactgggtcttgtgggaatgaagaggtgccctggagtagccatgcagtaagcagttgctagggatggggtggggtcacacagctgcctttgagtcatccgtgcttctataagtgaccccagtatcattgctgcaccccatctgatgggccagaatctcctcttaggtcaggtgtcactttggggtgaatagaaagagtctcaaggaaaaatcacacaagaacagggggtttgctgggcagtggtggtggcgcacgcctttaatcccagcacttgggaggcagaggcaggtggatttcagagttcgaggccagcctggtctacagagtgagttccaggacaggcagggctatacagagaaaccctgtctcaaaaaaccaccccccccaaaaaaaaacccaaaaaaaaaccccagggggttttatgtttattttgtttatgtatttacttgtgtgtgtacgtgcacatgtatgtttgtgtgtgtgtgcatgagtttttgcgtatgcacgagtgtgtgtgtgtgtgtgtgtgtgtgcatacagacctacagacccaaagatgacatcaggtgtcttctttttctgtcattttctgtgggaataaaggtagattctagtattctggttacagtgtccagggaggtggtggcatatcccagcactggccaatcacttagccaggtgttaccatcttatctgggttgtccgtgtgcatatctggctcctggctccttgctgttgcctggtctccctgtttaatgtctgtgagagcttgtctgttaccatggtgacagatgccctggtttttccaactctatcaaccatatacagcatacgcaacacacttcctgggacctgccacattgggtggcttcagattggtccctgggatgtttgagtaggcagctggctgcctactgttagcaggctggttacacaagtgtccattcaccctctcagagttctgtgtgaccagccttcttgaagaagacgacctgtgggtgtttcagtttgcatttctgaggtgtgtgtgtgtgtgtgtgtgtgtgtgtgtgagcatacatctatgagtgtgtgtatatgtgtaggtgggtgcatttctgtgtacttgtggataccagagtctaggttgggtgttctcccccatgattctcaagtttgcatgtttgtttattctgaggcaagctcttattgtgtagtgtaggctgaccaggaactcactgtgtagatcaggctagcctcggaactcactatgtagatcaggctagcctcgaacttacagagatgcacctgccttttcctcctaagtgctgggattaatggcatgcaccaccacacttgatcgtaaattatgtgtgtgtatataaattatatatttatataaatctacaaaatgtatactatatttatgttatatatatttatatatataagtaaatgtatatttggtggtgccggagtttgagcccagagcttcgtaggtgctagttaagctctctgccactctcctacctcccatgccagtttatttatttatttatttatttatttattatttatagatttatctttagatttatttattttatgtaagtacactgtagctgtcttcagacactccagaagagggcgtcagatctcattacggatgggtgtgagccatgtggttgctgggatttgaactcaggaccttcagaagggcagtcagtgctcttacccgctgagccacctctccagccctgccagtttatttttgactcagggtctctcactgaatctggagcttgctgattgtctagactgtctgaccatcaagcttcaggaaccctcctttctccactgatcccaatgcccagagtgctgtagttatagacctgtatgtctgggtttgatgacccacttggctttttcatgggtgctggggcgagggtccgcactcgggtcctcagcttgaacggctggtacttgtgtctagagccgtctgtgcagcctgctgagcctcgctggcttgtgagtaaggctctgagaacttgaaggactttaacaggctaacctgaggtttgggcttcacttcttcagagcatttgtgttgcgctgagcatgtggctcactttgtagctgcttgcctggcacacacgaggccccgggggcagcccccaggaccccatgaactttatatgatggtccctatctgtcatctcagattctgcttggctactctagggagtaggaagccaatctgggctagagagacactggcccccaaaaaggaatctgtgatgaaggtcatggggctcaggagtgtctgcatcttgcctgggatgacagtttgatagaggccagcagaaacgtcccgccaagggctagaggccaaggacgagtctgtcccatcaccagagctgaaatcagggtgtgtttctttcagtggtggtgccccagcctcctagagaggcctgtgttagtcacctaggtctaaacttgtgtccttaagccgtgggaacttcatggctaggctgggcgcttctagtgtcttgagggctcttggctctctccattcctggaggtgttcaccgttcctcagttgacggcatcaatgctcctgtttctgtctctatctctgtctcaacgtggcctcctctgtattttccatttcctcttcaaaactgagttattagtattatttatgtgtatgtgcatatgcctgcatgagtttatgtgcatagcatgcgtgcttggtccccatgaaggccggaggacatcagagcccctggacctggagttacagatagtgtgagccaccacgtagctgctgggaaccgaacaccgatgcctgcatccatcgagccatctttccagctcccctgctcttctttgagacccaacctaagaccaaacactttgacattcattcctattttgagttaagagtctcaccgtgcagcccaggcaggctttaaattcacaatcctcctgcctcagcttcccaagtgctgaagtgacaggcctgtgccactgcgctgatctgatatttttaacttgacatctggccagaccctatttccgattaaggtcacacagggcacagtcaagtatcttaggatcaccacctacatagatgcatggcagagtaccttttgcccagacagcccctactgtgaaaataaactacaggacaaaaatcaccagtctgtcctgatagcgggctctcagcacttgaaggtaggaagcaagaggatcagaagttcaaggtcatctctgctaatagtgagtttgaagccagtccagaggggaatgaccctctgggaagacaaaggtgacatgacactcgcgtcccccagcgtcccaagcacagaggtaactttggttcatggctctttgttccttgctgcaaaaaacatgtttgtgtttagaagagcccctccctgccctccctgtcctccctctcctggcccccggtacccgtgcgcacttcctgcactttgcagtctcggattgggcactcagatggctctgggtctcccccttctttccagagcgctggagggatcagccgtgtttcccatcagccaaggccgcggggaatggctgtgcattcaatagcatgtctctgggaaattgggcctattccagcaccatcttcccgtgtcttccggagctttctcaggagatatatttgtttctacagacgccactaattactcctggctgggtgcctggaaatcacatctgtggattaaggtgccaccagatctgagcttcctctagggccccaggagtcctgacatatcccccattcagcatacttgctcgcttgcttgcttgagctcagtttgatttctccactcatacagcccaggaccccttgcctagggaatggggccgccaatggtggactaggtcttctcaggtcagataagctaatcatttagacaatccccacaggccaatccaaatgtaggcaggccgtccttcactgagaccctcttcccaggggaatctacgttgtgtcaggttgccagagctaaccgctgcaaggttataattttaaaggacaagacacatcattgggcgtgcttagctcaaagttgtggcttaagtacgtaaaagagtaaaggttaatcaacacagaatttggtccccgaagtcacttgccgtgtttagtcaccctcagagcttcacagtaagaacttttctcaaagaaaaaaaaaaaaaaaaacagccgggcagtggtgtcgcatgtctttaatcccagcacttgagaggctcatatttctgagttcaaggccagcctggtctaccctccaggtaccatgctgtgtgaggtccaggcaagctcaccagatccagatccgctcccatctactgaggtccactcaaggcattttctgcaagtggaggctcacaggcactgaggtagaggtacccgtgtgaggccagatgagtgaaccttgactcaaatccccatgtccaggaacttgctgtgcatcaagatggcaggatttatgtggcagcccctggcagagctgtccccttaaggatcttgatctttagaccatctcctctctggatggtcatctctggtgtgtggctgagggcaagaacttgattccttgcgcctttggtttcctgcttgtcagtggggctggggctgagagagataaatgggtatcattggggaatcagagaggtgttgccgggatcggatccagctgctggctggcatgggtagcaaggtggccaattcaaatcgacagtgaagagggccagagagacggctcatcacggggaagggttcttgctgctaagcctagtaaccggaattggatctctggaacccacatggtggaaggacagacagactcctataagttatctatcctctggcttccacacgtgtgctgtggtgcatctgtgcctgtgcacataataaataaatacacaaataagtaaatgtgatttaaaaaaataattgaaagggtctaagaagtgtcctgtgttttctgtaattctccactaagtttatggccgatggccgtatggagtagaatggaggaggcgggcccaggtctagcttccgactcagtcagggtctcatctcccaaggactcagtttcccggtctgcagagtggttggtgttaattcctgtatccagttgtcaggacttaggggtcagcccacctacctataaggctgttgtctggggtgggagtcattgatgatgatgaaggtgtccccggggacctctcacacaaggggacgagtcaaagaaaggtgaggagaagaggccagccagggaaatggccatggctgtgggcgggaggctgcagtggactgagcagcctggccttcgaggtctccccacagctgaccttcccagtctgggctttcatggtgtgtggtccaggagcagataagtggaccgagctatcagcagtcagggtcaccgagtcctcatgtggaagtggaggcgggggagaaggggaagggagatatagaatgggctttgtttcaaggtagaggccaatggagagccattgtggaagaaccctatatgtatagcctggcctcagagagtgccattgccccctacccagacccacagcggggtctagctgagctctggctgaaaaaaaaaaccaaaaccccccaaacaacaataacaacacaaaacctgtgggattggaaggtgcctgtctcctagcagctgggatacccacaaactccagctctaagtgtcgatttaagacacttggtgccttaagtcacctccaggtgtctttcagtcccaccaaaaccttggggattattgatctggcagatgggacagacacagaggagcagggtagagaggaggaggagtctgaggctcttctggggaagcaggtgttccctcttcctgttgagctgactgccccgttgcatgctgggcccctcccaggccctggagttgcatggtgggcagagaaacagggtcttgatggactgtctgcaggacttgacacctgcacaagaggggcagtgtgactggcctgtggtgagtgtggctaacaaggccactggtgagggaggggcctctggtgctgaggagaagcaggcccctctgagggccaggcaaggagcatttccacctgacagaaaacgaaatgagtatccgaagtagtttacaggtggtgagagccctggagcagatagatgctcaggacacctgtcactgggctgcaggttgctgaaggtcaaaggtcgtgcaaacccacaaggacagcctctgttgaacttagtaggtcgtaggtgatgttgctggtactgtaaaagggtgcagctgccatgagaagctggtgtcaggtcactgtcccgtgcagccgtcctcctggggagtctggacaccacacaacagctgaaggtagaagggtcccaatacttagtgatgctggatgggcagataggaaaagcagatgaaatacagagaggtgagctggagagggtttcagaggtcaggagctcacatggctcttccaaaggaccagagttcagttccctgcacccacatcaggcgagtcacagctacttgtaatatcagctccaggagatctgacacccttctgggagcctctttagggactgtgctcatgtgcacagagcaacacacacattaataaaattaagattaaatcttcagaaatgaaaagagggctctccaagagggaatagtatgcagccgtataaaggaagagagagattccatttatttatttatttatttatttatctatctatctatctggagacagggtttcattatatagtccccaggtaaatagttcaaactcgtggtcctcctgcctcagctttaaagtcctgcgatagctgctgcagaggagagaattctcccacacactggaacatggatgaatgctgaagttagattctgagagacggcaggatggttgcagcgtgatttcgtttactggggcccctagagtacctattgatgaggttggagaaatgggacactaaggaggtagtgggaggggaaaggggccagggagagtgttaagtggagacagggtctcagaaggacatggaagggcgtggccattggtggggacagttgcccaagccatgggtgtacttaacaccatcagaatggatgctataaaatggcactgcctttaatcctagcagtggaagcagaggcaggcagatctctgagttcaagaccagcttggtctacagatggcgttccaagacagctgaggctacagagaaaccatgtctggggttgggggcttggggggagagtgacaaaacaaaacccaagtctggagactttagcatgataaaaatgaataaatcattatggctgatgtcccctgaagggacatgggtcacagccctccttactctggtttgtaaaagggggacccagtggccatagtgactatgttccagcctgatgagtgtcttagaaaaaacccagttccctggaaatatggccctgagctgatagctgatgctggctgccactgcccttcctctgaggtttggcagggctctgggattgttcttgaaccccagccagtctacagctggaggctctgtgatatgtcttccttgaagtgtctgggagttggtatcttcctagggacagccttgtgccccaggctattgcatgcagtgccactggaaggagccctaaggggaccaggcaacagcctggggattaggctgtagagacctgaggatggggcccctggccaaccccaacggccttgtgtggcactggctcaatggagaactcacacgtttctaatgtctgtagctgctactgaaagcattctctagaagtctcccaaagacttctcactcagtctaaagtcagggctaccttccctgtatggttgggctctacccaacaggtgaaccacatgtgtttctagaggggtaggaggcagagaggccttgggtgggcaacaaggtaatctgcttctgtgtcaatttcttatctggcatgtggctgtcgagaagcagagatcggaggatcatgggcatgagctatacactgaggtccaggctagcctgggtgacataacctgtcagaaaaactacaagaaaagattcgcattcaccatctggcttggaccttggttaagtgataaccattgtcattagcctgacacttaggcgccaggatcaagaaacaagaactcccagaatcctttggggcaccagaaagcctttcattttgagacaggctctggctgtgtctctggctctcgtggaagtcacacagcaatccctttgccttagcctaagtgcagagattgtagacgtgagttatactagcctcctctgcatggattggcttgacctaaactgagctgggctctccatcgacttgcttctgcgatttcagagtggcagcctgacctagctctgcagtggcttggtgcagctcagcctgaggctggtgagatgcttacaagtcatagctggttgctgcttggtgctggtggtcatgttatgagcaaactggtccctggtcagtgggctccggattagggctgtgatggaggcctctaggaatctcgctaagtctctcactggttgttttcatctctctgagcgatgtgtaggattgagtgacagatggcagataattgggagtgggtgacaggcttcagtattctactttaatggctgttacccggtgatgccagcataggcgtctgatgctctgagtacttcctctcatgtccctgagtcatgcagacttaggaggcctcttctccactcacaaccgtttccctgagggcagaatccagttcggttaactttgcttcgtagtactaaataccagtttggggcctcgacagtgcgggggagtggggcaggttagaatgaaaaaaaaaggagcaaacaggttcattaacagctaaatgaatgaatgactgatgaaaggatgaatgaatgaagtgttctcagcctatgctgttctgggtcagggctgagtgggaatgtcaaagggtgtggccactatgtgagccatggagttggggttagagggaaggctgcctgtgggctgcaccagtgttgggatgcaacccttgttgggcagcacctagttttccaaagggagtcagaaacgaggcttttgagactaaccttggttatgtctgacagggtttgggggtggggtgggcacatagacactcttgctttttgtttgtttccttttcttttctggggagtgtgtggtgtcaacttgacagggtctagaatcaccttggagacaaatctctggatgtgtctgtgatggagccaccctaactgctggagcagagaaaaaggagaaagatcctagcagtcattctcccctccctgcttcctgactgtggacacagcctggcaagctgcccctggcttcttcctctattgcctttccaccaagatggactgcggctttgatcagtgagccagattagccttccttaagctgcttctgtcctacgtatgtatgtatgtatgtatgtatgcatgtatgtatgtatgtagcaagccaggggcctgtgcacataccacacaagtgctccaatgttagcatttggcccttgagacttgagcgttggagtttctatcgagtctgggaaaattactgcacaccagaagcctgttaaacagtaacaggccccagagcgagagccaacctcacacgcctcccgtaagcttctcccactgacagctgtctgtgggccagacacggttgatatgcgcacctgctccctggtcagcatggtaggggttctcctctgagggactttattggggtagcccttgggagcagaaggaatatggtccggggattgacatacacataggtgcccacgtgtttgcgtccagtccagtccaaccagggagcttcctaagaaccctggagtggctctcactccacttgtctccagggaaactcactaggtcctgatgttgccctagaggatgctgggaccttctgatggagccaccttagccctctttcctggggctctgacttttatagctgggcaggctctctgctttgtcaagctggggtcaaagtgaggtcacaaggcttataccttgaggacacctttctacttctgtccctaagatgtatctgcctgctctggtgtgtcaccggagcagaaaccagtttccccatagcccgagggactcaccggccacaccctttgatgtctaggggtcatttgaggatgagattatgcatctcccagccactcaatcggatgtcggcttcacccttgtgtattaagctactgtagcaaaacccttgaaaacatttatggataaccagcgggcaggtgctggcgtttccccaggatgtacagtgaacaggtacttagctctagcaggcaaaccatggcgccgatacagttccaccgacgtcgtgcatgcattctggttgccccagagccttgccaacacttgtgattatcaatccctctcgttttggctgtgttggtatacgtcatagagattcttgtgaatttgggggatatgtccagagttggggggggctttatgatgtcacaggccaccagtctttatgctctgtcatcctttgggtatggttttcagtctcaaagctttcccatgatccaaggtagctctgtagctctctccatcaggaccgaatttctgggtgggggtggcgggtgtttcactgaaaccaccagaacttttagtgtggtgggaggggctgctgttacaaagattggtcctgtccattttcttttttctttttttaagatttatttatttattacatgtaagtatactgtaggtgtcttcagacacctacagtatgcatagggcatcagatctcattacggatggttgtgagccaccttgtggttgctgggatttgaactcaggacctttggaagagcagtcagtgctcttaactgctgagccatctctccagcccttgtccattttcttccctgctgtggtttaggcctagcacacagcctcttgtgcactgggtgctcagcagaggcctcgtggatgccaggaactgaacccaggtcctttgtaagagcagccagtgctcctaaccactgagccatctctccagccattcctggtgtgttcctggtgtgtggtgtcttcatgccctaggctggattgtcctttggggcccatccttcctgtatacatagtaactctacagggctagtacattgggactggctggctggctcagagctgacaggatatgtgtctcaacccagatccagggctggtgaacccagtggcaatgaccagaactgtttcctctccctcctcctcctccctctcctcctcctccttttcttcttcttcctcttctctccttcctcttcctcctcctcttgtttggagatagggtttctttctgcatccctagctgccctggtagaccaccaggttagccttgaacacagagatccacctgcttctgcctcctaagagttggattaaaggtgtgagccgacctctgtcagcctggctcaaaaacctgcttttttttttgaacctgaaatgtgtttgctgtgattcttgggggaggagggactggattttgcaatttcccaggtcagattaatgattgctttgcgagggctgcagcacctgagctgagccacactgagcagggcctggagaggctaggtacagtgtcctggagatcctgtgcagtcctgtgtggggatagaggctgggggagcttccatctctgtgatcttcatgaaccagaggcctctgagcctgatgcctgtgggatatatggtcagagagttaaagaggtgtagtgaccagaagtgtcctgttacccacacagagggtctgttgggtccctagcacctcatgtggcggccttgatcagctccagctgcctttttgtttgtttttcttttgaatggagcctctgatgtccaagtgtgttcggttcctgcagactgacctatatcctggccatcagagaacccgctaacccccggattatggtgctcactcccagtttggcttgcccagaccccacctcagactcaaagcctttgtttctctgatgcccagccaccctacccaatccctctctggaaggcagatggcttattctgtgcttattctgtacccaggtcactgctgccaagcacatgcctagtatgtactggggtcgtgggggagcaggggtccaagcaaatgatcagaatgctcacagacctttgtggtgtggagcatggagattgctccagttttcctgtctctcgggcacttggtgtgcattttggacatccccaaggcttgcagaatggagtcgaggtagcgtatggctccccacggaaggaggaaacctcagtgcattagtctgtcggtattgctgtaatgaaagacacaggcttggtgttagcatcacatctgatggggccacttcatgttgttgcgaactgcttggagcagctatgagccgagagattacagtggggaagccagaaggcaaagaaagtctgcaccatccccaccaccaatccccagccctttcccagtggggctaagcctcctgagggtcccctcccaaggcttcatgtcagagaccaagtctccaactgccaccgaaagcacgagaataaagtgtttgcagagcagacatttttaaggtaatgatctggtgggccaatgagtgtcctttagagaagacagaaaagaatgtgcagcggagaggaggggacagagaagcaggggtgggagccaagaggctgtacgaggctgagaggctcaccgctggagctcagggatgctttggtgacagctggcccaggaagctggtgcttggtaaggctccccacgtgggagctgtggtcatttattttagaaatataaatgtgtgtgtgtatgtgtgtgtgtgtgtatatctgtgcacatgtgcatactcggtgacttaggaggccagaggatgatgtcatatcccatggaactagagttacagatggttgtgagccaccaagtgggtcctgggatttgaacctgggtcctctggaagaacccagccaatgctctaaccaatgaaccacctcactttgttgttcaaaggcagggtctctcactaggatgtgagtctcgccatttttaggctagcctggctggccagcaagccctgggcattatcccgctgtctccacctctccagagctgggatcacaagcatacaccaccatgcctggctttgtatgggggccaaactcggctccttccacttatgaagcaagcactttatggctgagccatctccctagaattccaaactctgttctcaagaacacactatgtcaaaggtgcccacaggatgctgggggtttgtttcctacaatgatggattatggcgctccagaattggcttgggctccttcctccaagtcctctgaggtccttccaggtgcctggcactgctcagagttcacggatccagcatgagcatcattggtggggtttatggcctggcagagagacgtgagcacaatacacaggatgagtcattaacgtaatcgggaagaaggcagggagagcctcggaataaacaagagtttaagagggagcccagggctcggggtgggctctgtgggggttcctgagcacagacacaggatcccaggaggcttcctctgcaaacatggaaggcagaagaagcgacgaccagtgcaagggcctggtgggtgagagtgtgtgaacaggcaaggcagagtaagcatgccaggctggtctaaaggactaatgggggtatcagtaagacacagccctagagatgccactgagccagatgggcaaaggcttataggtcagtgttagcatggtaaaatttacaataaataaataaacaaacaatccatttggtttggggatggccatacatatgccagggtgcatgtagaagacacagaacaatgtcttggagtcttctgttctgttgtgtgggtcctggggatccagctctggtccttaggcttggtgattaagctcctttattttgcaggccacaatctgaaagatgctgggccctgggcttcagataggggaaggccactccccacaggcattccattccccactctggtggctgtacatgaggtacctcgtggttcagcctcccgcaacaccccaaccacctgcttgcagagggaaccgcccatcaccccatggttttcagtgagattctgcctagtcctctgtgccaaaaaagccaagcagaatctttggggaggctgcctttcctgctctcctgagagttctctgggtggcgaagggagacaatctgtctgagatgaggaccttcgggcgctctccaccgctctgttggcctctcaaaccttgagaatccctccggggcagagttttcaaactgggatgttatctttctgatatcggttgtgacatccctggggtgtgtgggcaactgatgtttaaaacatggcgggagtgtgctggtgatgatggggtgataaagaaatggctcagaggttatgaggagtatgtctcatctcacacacacacacacacacacacacacacacacacacaatacacacacacacacacgcgcacgcacatttgagtgtggggtgctaggaactgaattcagtctcctggaacagcctcaagtgcttttaaccactaagccagctccccacccccaccccacccccgcaaattaaaaacaagcaaatatataaaagtctaaaacacagtgtgagccaggtgtaatgataccccaggctccctataatctggacattgaagaggcggaggcagaaagatcaggagtttcagagtcatcctcagctacatatcaaatcagaaatcctggagttggggtggaaatcattttgtactggagaggttgccctgggtggcaggcagcatttgggagctggtattcggggtgttgtcccaggtagaggctccgcagagccatagggcactgcacagatatgatctatgttagaagtgcacacaagtacccgctggctgcccgggctgtgtacctcacccatgccctcacttatttagcttcagcttcctattgcagtgttctggggaagtatagtctacttgactttacagctgaccttttaaaaatgatgggtgcatttcagtttcggtattcaatggagggcgcagcaagatggctcagtgggtgaaggcacttgctgccaagcctaatggcctgagttcgatccctggggcccatatggtggaaggagggagaactgtcctctgacctccacacatgcaccctggcgtaagcaaacccacacacatacccatatacacaaataagtaactgcagagattaaaagaatataaaaacctttattgagacacgccagccttgtttattctggaatttctcacagtaggactcacaacgccctgtgcatatttccttctgtattctctcccccagtagtatactgagtccttccccttcccctccctttttctttttgagatggtcttacgtagcccaggctagccctgaattcactatgtagctgaggatggcctgggactcctgctcctcctgcctgtgcttctggagggctggggtggcagaggtgggcactgtgcccactttgttcagggctggggatggatctaatttaatccaccaggtcacacacacacgagtggagccatgagcacccgtgggacttgtctcgtgttggcagaggcaggttggtaatctcccagcagctccacagatgtttcctagagtctcggtttataaacactcctgtcatgggtggacacggagccccgcacgcttgctcggcaggccagcctttgctggaacaccctcctgggaccttttcctggcaaagcctgttttgtctttgttttgtcctcttgctgttgtgaagcgggtgattgccatgcagcaaggctggcctcagaaagccagtcaaccctctgccttagctgcctgagcgctaaagtgactggcgtgtgctccaacagcgtgcaccccgagagccagctcttaatttttttttttttttagttttccaccatgtgttgatttggttgtggtggtagggattgaacccagggccttgcacgggctgggtaagctcttttccactgagctgcatctatgtcttctcttcttttaaatgtaaaatcgtttattcagtctttgagaaccacaacattcatacaacgtatttcaatgatacacgcttgctactcctcccagatccccctacaggccactcctgattttatatccattttggttttggttttggttttgttcaccccttcgagacaggatctcactagatagtgctggctggtcttaaactcacatagatccttgtgcctctgcctcccaagcgttggaagtaaagtcacgtgccaccacagccagtactttcttcttgtcttttctttttcccccttatttacccactcaatccaattgctgtggcccatatacatattgtaggggcagttttacactgtgtggcagtaagcaaaatagtagttctggggtcatgggggaacagcacccccagagcctgtctcagccatttgattctcagccagatttatagtatcgggcatgtttttcgtcctatggagaaggccttaaatccagtcagagagtattggctaaacccataatatccgtgccactaatgcgtccgtgggcagatcttaccaggctgataagctgcagggtagtttgcaggagtcacagctgcctaagggtgccagggtcttgaaatgcctctctgtttttgccagatgttcaggctgtgggtgaccaacggaaggtgcggcaggacatctcttaggtggactcagcaggggatttttctttcagtgggtcccgaggaggacaggccagacccagccatggctttcatgactccggccttgcagtactcaaggacaaaccccaggcccagagagccaagctaggcctgagagagtgtggcccagtgtccgcctgcctcggagtctactctgacgtggggctgggcttgacctgccagttctggcttgccacctcccctggagcctctgcctgttgtttctggctgtttggggacagtggggtggttgtctttgtcctggcaggtcgagttcaaagtcaaagctgtttggcttttggacactgctatctctgatgagctgggggtggtgactcttagctctgtggcattagcagaggtcccaggtcagggaatggtccacctcttcctcctagccttggagaaaatcagtagttctgttttgagacagagtgtctcattcactgtgtatcccaggctgacctcaaagttaccatctaactccttcagtgtcccaagtgctaggatgacagccctgcatgactggacccagggctgcctgcacactaggcaatcactaagccccgcccccggtcctgcttactgtcttctgtccctcactgctggtgactcaagaatcatcctcttccctctccctgctcctcagtacatcacacagcactggctctgcccccgctccacccccccccacccccacccccccacccggtgcataaagcccttgtcttcccgatttggtaaaagcttcacgggactggagacagccagcctgtctacttcccactcctgtctgctactgcgggaacctcatctgtcaaaaatgaatgaatgagtgaccaaatgaatgaatgaagaaaagaacaaaagaatgcgggagtaaatgtgaaatgatcagtgaataatgaatgaatgaacgaacgaacggctttctggatgagttattgactgaaagaatggagagacagccacctgtgcagagctccagccctaggagcacctccctcgatgagcactacctagccagtgttctgttttgctgtgaagagagaccacaacgaagacaactctgtattataaagcatttaactgggggcttgtttacagtttcagaggcttagtccgttatcctcatggcagggagcatggtgcaagttaggtggagttagtgttggagcaagttagtgttggagcagtagctgagatcacaggcagagagggagagagagagacagggagggagggagaccaatggaccctgtgcttggagtgagcttttgtaacctcaaaccctgcccctagcgacacacctccttcaacaaggccacacctcctccgacaaagacacgcctcttcctccgacaaggccacacctcctccaacgacacaccccctaatccctgcccatagcgacacgcctcctccgacaacgacacacctcctaatccttccaagccgttctccaactaaaggctaagctgcaaatatctgagcctgtggggcctttctcattcagaccaccccagacacccttccagatgagccttggagggtccatggcgcaggccaagtctcaggcagctgttgcagagccgtaaagtggggaagcccctcctcacactcctccctgtgtctccccacagaatgtccgcatagacccgagcagcctgtccttcgggatgtggaaggagatccccgtccctttctacttgtctgtctacttcttcgaagtggtcaacccaaacgaggtcctcaacggccagaagccagtagtccgggagcgtggaccctatgtctacaggtgaggccaggcagggtggggtgggactgtgtgtggnnnnnnnnnnnnnnnnnnnnnnnnnnnnnnnnnnnnnnnnnnnnnnnnnnnnnnnnnnnnnnnnnnnnnnnnnnnnnnnnnnnnnnnnnnnnnnnnnnnnnnnnnnnnnnnnnnnnnnnnnnnnnnnnnnnnnnnnnnnnnnnnnnnnnnnnnnnnnnnnnnnnnnnnnnnnnnnnnnnnnnnnnnnnnnnnnnnnnnnnnnnnnnnnnnnnnnnnnnnnnnnnnnnnnnnnnnnnnnnnnnnnnnnnnnnnnnnnnnnnnnnnnnnnnnnnnnnnnnnnnnnnnnnnnnnnnnnnnnnnnnnnnnnnnnnnnnnnnnnnnnnnnnnnnnnnnnnnnnnnnnnnnnnnnnnnnnnnnnnnnnnnnnnnnnnnnnnnnnnnnnnnnnnnnnnnnnnnnnnnnnnnnnnnnnnnnnnnnnnnnnnnnnnnnnnnnnnnnnnnnnnagaggcggtgtctgtccgaggcgagtgcatactcgcatgcgtgtcctggggtgagggctaatgtgagtgtaaatgtgttgtcatgggggcggggcacagaggacccaacagcgcacaaaatgggcaaaatggctgctgttgagtcagaaaagtcaaacaaacatgcagaagtgaagccagttacgcagcatctaagaagtgagcggtgctgggtagtggtggcacacaccttgaatcccagcacttgggaggcagaggcaggtggaattctgagttgaaaactggatccaggagcggctgcctggtcctccaccttggacagagagttttaacttccataatgcctattttagccccatctgtgagacagaggtaatggtacccactgtgggtaggttcaaggataagatgagatagttagttggagccacttaagctctgtctgccatgccataaactctcagtaaacgctgcctgtgtggatatctgctccatgctggttgtcaagtgaaagggagacgtggggggtgggggcagcagttggagttgttttccagagaggctcaaagagccttatggctcaccagggaaagcagagaagagctgattggtggtggcagtgtcttgccctggacagacagcgaggatataaacaagaggtggcaagcttgatttggtggccttggtgctgttgggtatcagtgtaccatcaccccagggcatgctgggagatgatgggtgctttcatgtgacctcacagagccacagctgactcaatgcctttttacagggagttcagacaaaaggtcaacatcaccttcaatgacaacgacaccgtgtccttcgtggagaaccgcagcctccatttccagcctgacaagtcgcatggctcagagagtgactacattgtactgcctaacatcttggtcctggtgagactgtggccctgtgtcaaccccatgccaaccctgcttcctcccagcttagccttcaggagtcagagagcaagggccacctcagccccactgtctccatggtgaccatcccctccttctcattgccttacctcccatctgagactccgggacctccactgtggtccctggggaagcatgaaggtcagagccactgggggccagagggcaggtgggagtccggaagagcaggcatttattgagcacactgtgtggggtcgctgagtctgtcctttggtgtatgcggggatctactcaaccctgctgttcaggggaggaagcaaaagccaggcagaggcagggaatttacacaggggccagaaggaccctccccaaggacaaaatcccagataccaattgggccagtgttaccaaggcaggatcggatcctgtggtcagacatcacggccctcgctggaagtttgaggacagggtacacggtggttggtagtggggggacagtcaaggcatgatgtcacgaggtaagcattaccattcccagtgacactaacttgagagattggaactgtgagctttgtgtgattttcatgctttttagaagattcttctgatctccccccacccccaccctcaaccataggaaactgttgaaaacaccagctttcctgcagttgatgcgggccgatgctgactggattggtcctttagccaccttgcctcgagtccattttcagaggtgtcccccgggtccgatggggctggagggacactttttgtttttattaatttattatattactactatcattatcattattttgagatagggtgttactgggcagccatagctgccctgtatctcattatgtagaccaggccagccttgaactcacagagatctgccagcctctgcctcaagtgctgggtgtgagccaccacatttgtcatattaattccagtttttaaaaattatttattttatgtatatgagtacactgtagctggcttcagacacaccagaagaggtcatcggatcccattacagatgtttgtgaaccactgtgtggttgctgggaattgaactgaggactctggaagagcagtcagtagtactttaaccactgagccatctctccagcccttaattccatttttgatattgaaaaagcaacagcattctgtgctgggccagcaggatggctcagtaggtaaaaggtgcctgtcactaagtcggatgacctgactttaatctccaggacccacatgactgcctcacattgtcctttgacctctatacgtgcactatagcacccctcaataaatataataaaagccctgtgttgaaggagacctgtaagtgttggtgggtaggcatcatgcgctcgcttgatggaaagaacctggagacaccagccatgcgttgcccaggaggtggaaggtggcttttggttgaatggcctttgggaaaaaacaagagcccagatgctccatacggaggaagaacaaacaagaaaactataaactcaactgaacttggggcagttagaccctggggggggcttcgggggagtagatattctgggctcccagtgttgaggtggggcagggacatgagaagtgaggtggaatccctgtgaggagactgcggcaggagaatgctgatttccaagccagcccagattaatcattgagaccttgctgtaaacatgttcaaaaggaggccacggggagtcggggaggctttctccatatgctgtgtttctaggctcatgttactgatagaatagggttcacgtcctagctataaaccgggtatccaaggggctggcgagatggctcagcgggtaagagcactactgactgctcttccagagatcctgagttcaaatcccagcaaccacatggtgactcacaaccacctgtaatgagatctgacaccctcttctggtgtgtctgaagacagccacagtgtacttatttataataataaatgaatttgggaacaagaagaggccctaaaaattcaattcccaacaacatgaaggctcacaaccatctgtacaactacagtgtagtcatatacattaaaataaataaataaatctttaaaaatcaaaaacaaaacaaaacaaggtattcatatctttgctggcccccttctgtgttaggttttctcttaaccttggctccagcctcatccgttcgcttggtgagggatggcatgggagcctccttctctgtgccccggctctgcggagtgtctctggtggttcactggttccatttaggcctcaggtgtggctctacagacacagtggctcaggaaggcttccggaggtcaggcctgagcttcgtgtatgcctctgagtccttgtagagttcactcaatctgaacccatcatcgggtgttctcgagagtacaggttaccctggcaacaaggaccagagaaaggtccatcctgagggcctgagctctttgcctgaagcctggttgaaagtgggggatggtgtcctaccatgtcctttaccctaatcccatgtccttggctttccaggggggctcgatattgatggagagcaagcctgtgagcctgaagctgatgatgaccttggcgctggtcaccatgggccagcgtgcttttatgaaccgcacagttggtgagatcctgtggggctatgacgatcccttcgtgcattttctcaacacgtacctcccagacatgcttcccataaagggcaaatttggcctgtttgttggggtaagtgtcttctgtcccttcagagagtcaggttatctctcaaggaccctaactcaaaccagcttaaacaaaaattgggaaattatcagctcatataacaggagatgccaggattacattcaggtgcggcttgatccagttcgagtggggggatatggctggggtttaacttagaagatttgaggcacagcttgcggggaggaggaggaggactggatcttcgaagcacacctctcaaatgtccccatcagtgcgacttagaggcacccactatttctcacagttgacctttggtaacctgagctaaggtttggtctctgacccctgaccccaactctctggttcagctcagctttctctgtggggatctactgacggggtgtgcttgcagtaacgttacccacaccctccaggacctgttattactgagttcacgtgagatttactacccagtggttagagcactggctgttcttcaagaggacccaggttcgattcccagcacccacatgacggctcacaccccatctgtagctccagttccaggggatctgacaccctcttctggctcactcaggcactgcagtgcaggcaatgcacagacctacatgcaggcaaaaagactcagacacataaaataaaaatatgtccaatcttgtggagaggagacggggtaaggcactgtgtctcccagtgaccagatggggaccccatggggtgaacacataacgagggcggcaggctgaatacccagtcttaaagcttttacagagttagaggccctgggtaaagccctgtacctgtctgtacctgcccttcccagtaccccatagagactgccatccctctcttcctgacaattgaggtggggcccttctactgagcttctagatcgttcctgtcagaaatttgtattaaattctttctttctttttatctttgttttattatttttattgagtcagggtctctctatgcagtcctggctgtcctggaattcactttgtagaccaggctggcctcaaacagatgtctgcctacctctctctcctgagtgttgggagtaagggtgtgtgccactaaacccccgctaaaatgcctttttactttattagctgttggccctgattgagtagacttgtcatctgtgtacatgggagtatgaggcaggagtatggcaaattcaaaaccagcctggacaaccctgtctgaaaatgtgcaataaaaaagaatgctggatggagggtggagctggagagatggctcagcagttaagagcactgactgctctaccagaggtcctgagttcaattcccagcaaccacatggtagctcacaaccatctgtaatgagatctgatgccctcttctgatgtgtctgaagagagctacagtgtactcacataaaattttttaaagggtggggggaagctgggggtgtgactcagtggatgagtacttgcccacatgtgtaaggcactgggttctgtccccatcatttatgcagcaacagtgaggggacatacctatagctgaagaataggtgggcttgtgcctatgttgtgatctatgcccagggctaaaggtgctgttccctgcctgtctgtagatgaacaactcgaattctggggtcttcactgtcttcacgggcgtccagaatttcagcaggatccatctggtggacaaatggaacggactcagcaaggtgagcaggagggcagacagtccccatcgattggtgtggggactacaccagaacaagccttggcggagggtgtccggggcacccgaggacttcacggatcccacaactgtccctgcggtatttctgtcgggaactcttttctgttcctgagttgtcatttctaaggctgacaggaagacattcccataaagataagacaatgaggtccagcaccttgcctaggcccacccggaaatcccccaacactgcttatagaacccagcttcctggccatttacccaccaccacgcctctgtgtacccagagaaatgtgttttccttccttcttcgaatacacagaaatcctgtcatgtgctattttgctgctggcttttctccttaggggcatctttatggataatgtgtttttgttctgttgtgttgtccagaggcccaggtactaaagatggaacgcaggccatgtgaatctttgacaaggacaccactgctgagctagacttctgcccttcactgggggaattctaggcaggggctctaccactgagccacgcccccagcccctcactgggggattctaggcaggtgctctaccactgagccacacccttaaatttttttattctgaaataaggtctctgtgtatcccaggctagcttcaaaaattcaatcctcctgtctctgttgccttgtaaatgtttaattcatagatgtgtgttaccacacccagccaacagctattcttagtgggtgctgttcacattaaccagctgctgttttatatgcattggcattttgtctgcatgtatgtctgtgtgagggccttggatcccctggaactggaattatagacagttgtgagctgccatctgggtgctaggcattgaacctgggtcctctggaaaaacagccagtgctcttaaccactgagccatctctccagcccctaatcgtctcctttctactatgagaagggctgattgaaagctcttacggcagagtgggaagtgcgtttagttttgctgttgctgttgctgttttgttttgttttgttttggaagcagggtctcagtgtagtcctggctagcctggaactcgatattgtacaggtgacttaactgagtccccacaatactgtatgttctgtccccactgtggggaacaggaagctgggctagaacctctgtgcacacagcctgctcacgggcttggatatgatgatgtctgtactagggcacacattgggtgtagatcttggctgtccctcaaggctatatctcatcctgtcctgcagatcgattattggcattcagagcagtgtaacatgatcaatgggacttccgggcagatgtgggcacccttcatgacacccgaatcctcgctggaattcttcagcccggaggcatgcaggtaagccctgtgtagggactccctgcctcctaccaggaaactctgcttctgagatggttcagggtccactcaggtagctccctggaagtgtgctcaaagtgtctggccttctgtgtactatgcctcaatggtttttcttgtcactgtgacaagatacctgacagaggtgacttgcgaggtgtctggggactcagtcatggtggcagtggtgaagggtactggtaggaaagtgttaaagtcttgtagcttgggctccaccatccccagggtcctaactgtggcctaggaagacatggtgggtcttcagagacccatttccaggtggtgccctagcctgtgcatccattctggccacaccagagatgactctggcctggggactcactgggctgatctttgagccctcttcctctctagctcacacaggcagccatgcttcatgccaggtgtgaacacagccacgacggggtgagcaaagtctgtgtgctctggtggactttcaaaagcagaacttcgggtttggttttgttttgtttttacattttatttattactggttttttaattttgtgtatctgtgtgtgtgcacatgagtgcaggtgcctgaggaggccagcagagggcgtcagatcacctggagctcctgtaagaggtggctgtgagctgccctacgaggatgctgggactcaaacgttttgttttgttttgttttgttttttgagacagggtttctctgtatagtcctggctgtcctggaactcactttgtagaccaggccggcctcgaactcagaaatccgcctgcctcagcctcccaagtgctgggattaaaggtgtgctgcgccaccacgcccggctgctgggactcgaacttaagtgttgctctaaactactgagccacctctccagcccatttatttgtgtgtgtgtgtgtgtgtgtgtgtgtgtgctgataatggaacccagggcctcacacactctaagtaagtggcctgatactgagtcatgccgcagacactaaataggatttcagcctggcagaattatatgagagcagggtgcaggccaggtgtctctttccttcagtccttcatggggttatctccagaaacaaaggcctcttcttacacaatcacaaggatcgaaatcagagaatttaacatcgccctaataagagcctctaagctggtgctgctgcataaaataacaaaacaaactgtgcttataatttcagattaggggccatctttgtggctggtggtggggggagatcaaagcaggaactccaggcagctaatcaatccacttacaggaacagagtcacactgaatgcactcatgcctatagctcagatggctgtctccattcttatacagtccatgagccaaacctagggaatagtgccgcccacagtgggctggctcttcccacatcaattaggggaatccagacaatttcacacagtgagagtctcttcacaggagattctaactatgtcaaattgacatttaaaaacttaccaccagactgtgtgaaaagattttctgagaagagcttttgcttagtgttgggtcttagaaatctgggtgtcggtcaggtgtggcagtgcttgcatttaatcctagcactcaaggcagaggcaagggaatccttgggagtctaaggccagcctggtctacatagctatttccagttctttacatagagagactatagaactacataaggaaggggcagagggagggagggagggggagagagagagagagagagagagagagagagagagagagagagagagagagagagagagagagcgccaatgtcttatcctcttttttttggttcatcccaattggtttcctcttgttttgctttgttgttttgagttgggggggggggtctcactgtgtagcctggcaaaaaagtatcctcctgcctcagcctgcacagtcctaggattgaagccatgagccacagaccgagttctgccctggactctctttgttttgaggattgagcagacatgtgtgtgtgttatggtgttgaccatggacagtgtgggtcacccgggccttgtttcccatcagaagagtgtttgaggccagacagtgggagtgaatggatgaagaggagtcagggtggacaagggagactgggaaagccgaagtctgggctgagggagaggtgggatccggaggttcaggggcaggaagggacatgactaaggccctggcaggtacagtgagacaggaagtggagagggaagctgtggatggcatctgtggatggcatcgcactgcagggtgactgcagggccatggtggttgctcatccctccgcatgcacagaaaaccattgcccaaagccttggtttccacagtcctcatcagctctcaagcccctatcaagagaacatggcacatcgttgtaagtgtaagggaactctgtaaacttcagattatctcaagtgactgacacagctactgcagacatgtgctgtgcatgttttagcttgcttgctttctttctttctttctttctttttttttgtgtggtttttcgagacagggtttctctgtgtagcccttgctgtcctggaactcactctgtagacccaggctagcctggaactcagaaatccgcctgcctctgcctcccaagtgctgggattaaaggcgtgtgccaccactgcccggctgctaccgtactgttatgaatcataatggaaatgtctgcgttttccagtgggcttttgtgggcggttacgacccacaggttgagaacctccggcctagggcatgctggccaaactgtgctaaactgtgctgagttctggtttttaatttgcctcattggaaggatggattagtgagtggggagccaagggagcaggcagaacattgagggaccgctgaagtttcctcagcaacaggtgactagtgtcattgctggtccctgtggtttcttctgcaggggtgccccagcctctgtgctcaaggcacagttctcaccctgcctcccctctgcaggtccatgaagctgacctacaacgaatcaagggtgtttgaaggcattcccacgtatcgcttcacggcccccgatactctgtttgccaacgggtccgtctacccacccaacgaaggcttctgcccatgccgagagtctggcattcagaatgtcagcacctgcaggtttggtgagtgtcctctaagtgttctccacctctaggctgaggtgagagggtggtaccgggattttatctgctgccagcttgctgtcccattaatctctggtctctgcacccatgatgatctcagtgctacagatagggagctaaaggtaactggaaaaaagataacagccaccctgataaatgtcccaccggcacgcgttatccacaagccgtgtcgctccgaagtccgaagggtcctgccccgaggttaagattccatcagtgggcactgcttcttggccaaggagaggagcctgccctcatcctttcctgcttccggaggcaccacattccttggcttgtggtcccttcctttctcaacctagcatccagcttgagactgggtagcgcgttgtggcccaagttagcttcaaacttgcgcatccttcctgcctctgccttcagaggtatcgggatagaaggcatgtacccagacaccagatccccccaaaacactccgttctatgaccacctcctcctcctctatccagcccatagctttcaggaccccagagactgactgggtagaggccactgggataacctggtctgttatcctggtggctctaacttctttgcccactaggacgaggctggaaacattccctgtggccattcacctgctgggagcaaaagctagagtcctgcccttcactcaaactggccacgctcctattgtgtcaaactctcctctttagccaagttgggtgtgaatcttggtactggctgtggccccctggcacatctgctctgtgttctaatcctgggccctaccctgctgctattgctcaagtctgctccgtgcctcacccctcacctggcagtcaggcccaggctgctctaagcacctcccacacagtctttctccttcccacccaccttcttcccgtgtcactcgggtgcccttgctctctcgccagctcgtattgcaccagatgtcaatcaaactcaaatgaaatgcttcctctgatcctgatcagatcctcccagacactctccctgatcttccgtcccctctggctctccagccgctctctggtacactctctcttatgccttcctgttgcctgctcatggctgtcgatgttatttactgaaccctcccctgcttgtctcctccttggactgcaaaccctgtggccatgtcccaataggatactgggagtcaaacttctaaggcccctacacagacgtgggatccagggcttgcctgcggacaggaagtttcactcacaactgcacctccgccttcccctccttgtaccagcaaaaatcccagggcttggttgaactggtccagttctgacctagtcattaggctgtgttaattggccaggctgggtcccacacaccgcaggggcagcaacaggcccacatcacacagaactctgctgtcaggaacagaatttcagctgtgaaagagaatctaagtgtagttgtgtctgtagcttgttcttttgttttgttttgttttgttttccggagacagtgggtttaagtatgcgtgtgcgtgtcgcacacgcgtggagggaggtataaacaggtgcatcgatggatggagaccggaagtgagtgtcttccttcatcactctttgtttgtttgtttgtttgtttattgatgcagatttttcaatcactaatcctggatcttgggaggtccagggatccacctgtctctgcctcccagttacagatgtggcgctgctgggaacccgaattcgggtcctcacacttgcacaggaggctcttaactgactaaactgttttcccagcccctaaagcttgccccttgtaaatcgggtgagaacaagaaaggggaagaggaacagggattcgagtgatagggaacacggccatgtgaccaacaaccccacaaagaggcaactcttaccacacccaacatctccccttcctgctcctcctgcccactggcctgacttttggtctctcggctctctgcctggcattactgtttacatagatggagtcacaactgttctttctccctcgatccctgatgactcccatgatggctctcatgattatatggtaaatctgcaagatagcgggtgatagcctagattgttgggtggtgttccatggtggggctaactctgcttgccttactccttcctggctcacggagctttcttttggcatttcaccactacaaggatgcttctagaacattctcgcacctgctgtaggaggagtgcacctgagttcgaatttctgtggcattttatcttaagataaagaatacacataggtttccctttctgggtcacgagactttcttggactcaggactccccatgtctcctgtccttgtcttgggagcaccttggatcttccctgaagtggtccttaatcaccacgcgggtaatcctgagcagttaagtctggatacacgggccataaagctataaattaattatacttattgcccgggtgcgtctctctgagggtgtttggaaatcaaaagaaaagatgagccacacctattgttagaaagccacgggcatgccacctgcagcaggtctgtgctggcagccttgacatcctgttggaatctgtgcttccaggtctggttaggtgggggcttcatctcccggggatccatggcatccctctgaaagaaatggggttctctctgatctttgctggtgtctcctttcacagtatggttggaaggatgggtagggttttccaagtagaaggcagcatatctcagcgtgattttagaagggtccacagaggtgacattaggcctcagggattgatcaggtctcttttctgttctgttgtatccttggtgttgtgtttccatgagggcttgaaggccaccctgaggatccttcgcctgtctttctgacaggaccaggtgtgtctctggagcctcgaaggtgctagggttcacctggattctcagtgatccgggttctctgctgcatccctgcccacgtgcacctcctggctaggccatttctctgccaaggctgtcacaggtgcagcactcttgtgtctgacacctgcacttgaagatgcccatagcagccggttcaggggttgggagcaagaggtaggggttgggggcttcaagcagtggatgtcctggagaccagactcggatggaactcagagatccacctgcctctggctcccaattaaagaggtatgctagcctgtctggctttggattttaaagaaatgttttcttttttttaaaaggtttattatttattttatttatgagtacaccatagctgtcttcagacatgccagaagaaggcatcggatccccattacagatggttgtgagccaccatgtgattgctgggaattgaactcaggacctatggaagagcagtcagtgctcttaaccactgagccatctctccagccctgtttgttgtgtttttgagacagagtttctttttgtagtcttagctgtcctggaactcactatgtaggccaggctggcctcaaactcagagatctccttgcctcttcctcctaggtgctgggattcaaggtgtgcaccaccagacccagctaaaacacaatgccccccctgtggatctgttgccctgggagcctcttgtggcctccccagggagactcagaactcggaactccccaggcccttgtcctgagatctctgggttgagccactttggctggttggtggtaaagtcccacctcagggccctgggtgggaatatctcattggtgctgtcccttccattcctgtgatgtcagagacccactcacgtgtacccctgagctacaatgtctccaaaagcagtctgtgtgcctggcttgacattcagactccgcttccactcctaaattcatatggtgttaattttcctttccactttcatctcccatgattccctgctgcacctccagacctggaggggtgggggtggggggttgaaaatcacgtccaagctctcacctcttgctacactcccacccggaatgcctttcccttgccgggtagcagctgctctnnnnnnnnnnnnnnnnnnnnnnnnnnnnnnnnnnnnnnnnnnnnnnnnnnnnnnnnnnnnnnnnnnnnnnnnnnnnnnnnnnnnnnnnnnnnnnnnnnnccacccaacaccccacccacccccaacactgtaatcggccactctggctccatccacccttcccaggtcctgtgtgtgctcagcttggtccccagtgttagcatccctgcatccctggcaccgaggcaggccaacgtgacgctcccgtcttctaacgcctctcttcccctcctccaggtgcgcctctgtttctctcccacccccacttttacaacgccgaccctgtgttgtcagaagctgttcttggtctgaaccctaacccaaaggagcattccttgttcctagacatccatccggtaagctccgtgtcctgctagtggctggggcccattcccagagattgccactggccgctgggcacccgccccgctccccccaattccccaggacagaacgggttccaactgaggcaggggagttcagttccttccacagcggctgctcctagaacttcaagtcatcaaagtcttactttaccccaattccagagttcagtgatatcattaccttttttattggggcctataaaaagatataagatagtaaattaattaagacctatcagccgggacgtctccttcaccagagacagatacccttgacagtgtcaagacactaaagacatcatcgtgggccagtgtctcacagagaaatcagggggaggaatttgtcctctgttaacttctctctgcctctggtcactgtaatatgtgtccagtccagggttcctgccctacgtgacgccctgaaggcattccgtgaagaactcttttttgttttactgggtggggatggaagcctgggttttgaacacacaaggccccaggctctgatgccgagctgtgcctgcagctggccttgaacttgcaaatcctcctgcctcggcttccagtgtttcttcacacctggctcacagctgagggttatcgcagaggaagggtgggcacatggggcacagtcgtctgaagtctttcccaggttgtgcctagctccccagcaaggaacttgacatagaggtgttttatatcaggaaagcccctcagaataggggggcctagttgtcgactggggacctgtcctgtgagcctctctccctggggcagatccatgcttcatcccagaggacgaaggtgtttggtattattaactgtctatgcaaatggcacagtgaggccaacacactagcttagagaatggggcaccctcacctcaccccccagaacttaggttccaagaccaacactgggcacctaccctggacgacttctagggagggttgccgggcccacccatggtatgcgtggttatcacatccatgcctctgtccaaaagtcataccaggtttctggaggcctttgccctgggggcaggagggatctgggcgtcctgggcaaaacgtgtcctggccttctactgtgggtgattacaatctgagaggtggcctccggcctcccatcaatctttcaagagtctcatgatctgggcagggctaaaggcatcaaacggtggtctcttttcaccaaccttttccattctagaactttcttcctgatttaaataatacctgtgaattctcctagtgattttttggttgttgttgtttttaattttatgtatgtgagtacactgtcactctcttcagacacaccagaagaggacattggatccaattccagatggttgtaagccaccatgtggtggctgggaattgaactcagcacctctggaagagccgtcagtgctcttaaccgctgagccatctctccagcgagattgttttttttaaagcatcacattttaaaaagagagctgcaagcaggcagctctctgtggctacctctgttagggagcgccaggatgctacatagtgggaaactggctcgattaaacctactcaccctggaccaggcccttcctttggttccctgggctattaggaaatgtaaacaggagaaaaaagacatccttactgcgcatgccccacacttgggaggcactgtcttaggcagcttcgtgagggctgggaggatagcttagtaggtagggtgctcccctgccctgcacagagccctggcttccatcccagcaccatgtaaagttaggcataagccagtcctcagaaggtagagacaggaagatttggagttcaaggtcatccttggctacatagcaaattggagtccaacctggaccacatgaaatctgtccccaaacgaacatgcagatgtggggggcggggggtgtcatccctctggcaacaagtgtctagagaggggatcttgcgatagctgatccctttgggagcaggtatttcctgagggagagcccaatgggtgtgtgggaaatttctagaagggtggatgccccagcaggtattatctggtttaagttggataagaaaccccagggctggagcaggctggagcaggctggagcaggctggagcaggctgggaggctccccacaggatcttacatctcctcactgtatttatgctctaggtcactgggatccccatgaactgttctgtgaagatgcagctgagcctctacatcaaatctgtcaagggcatcgggtgagtggagttgggacgggagcttctgaaagcttcaggggccaggaggtttcatgcattggtgatgcaaggcacaggacagggcgaggcccaagcgttgggatccaaccacctcttttcctgggattgcatcattgctctggatggagactcagacccaggctgcatcctgacactacctccatcctccacgcccaagggctcttctgccattagtcgcattggtaatcttgtctcccccacagtaggatggatttgcctgcttgtatgtctgtgcaccatgtaagtgcaagagccgccgaggccggaagagggcatagggacctggagttagacggagttgtgagccactgaatggatgctgagacttgaacctgggtcctgccagtgttctcaaccacaattccctgggtttactttatgtttagctttgtgtaacgtacagagtgagactgagagtcctcctgcccccattccctgcttgcccggcagaaacatggtggtaggagtccagccttggggctggagagatgtcttagcagttaagagcactgacggctcttccagaggtcctgagttcaattcccagcaaccacatggtggctcacaaccatctctaatgggatctgatgccctcttctggagtgtctgaaaacactaaagtgtacttatgcaaataaaataaataattctttgaacgaaaggacccacatgctggtcactcctcagcatcgcagatcacatgcctgggaaccactgaggaagaggtggactctgggcttcatggtgaaaactaagtccgggaattgctggactcagctaggcttctgtacacacacacaccctgggactcctgcatgccagaaaacactctttcactgaattacatcccagccctcttcactttttaggtctcactagattacccaggctgcccttaatctctctgtagcccatcatggccttgaacatgcgccacttgatctgactcatctgggctcttgaaaccggaggccaaagtgggctggccacgggcttgagttcctgaggtcagcagccaaacattgatttgctccactgcctcaaatactctttagaaatctttatagatttatggagaggtgtcagagacgcaagcaaatctttgttctctgtccccggtgcattcagtactgtccgctcctggcagtatctgtcacggtaaggaaccaaagtctagtgcagcgttattgccacaactgcagcttctcagcacgagatgccgcccgctcacgcctcccgcccggctcccgtggctgtgatgggttgttttgttttgtttttttcttttaatctttgtttcttgttggtgttgtgagttttgggattttgttttggtttttggaggggaaggtggttcatacagaggccaaaagaggatgccatgtgtcctcttttatccctcttccctttcttccctcgcggcaggaattctcaccgaagccccagctagcttctacctgtctcagccctggggtcacaggttcaaagccacacacagcttttagcctgggttcaggggtctcacctcgggttcatttgcttgagcagcaaatgctttccccactgaaccatccccagcacagtgatagtttctcctctagcttttggggtgttaaagtacttgctggacctgggtgtgtgtggtgcgatcaggttcccctgtagatagtaacaggggcagccacccaggctttggtgggaggagactcattattattttattattattggtattattattattattattattattactactactactactactactactactactatttggctttttgagacagggtttctctgtgttaataaccttggctgtcctggaactcactttgtagaccaggttgacctcaaactcacagagatccacctatctctgccttcccaagagctgggattaaaggcattgtgccaccacatacacagatattattatttatttttaaagttgtatttatgtattttatgaatgagtggtctgtctgaatgtacacctgtgagccagaggagggcatcagatgccatgatagatggttgtgagccaccatgtggtggctaggaattgaactcaggaccttttaaccgttgagttatctctctagccccatttttagttgtgtttagtgtgtgtgtgtgtgtgtgtgtgtgtgtgtgtgtgtgtgtgtgtataggtgcatgccacaatgaacatgtgaaggttgggacaactttagggagcctgttccaccttctgggtcccggggatggaactcaggtcttcaggcttagcagcaagcactgtcacccactcagctgagccttgccacgccccttaattaattttttgcatcagggtttcctgtagcccaggctagcctcaaacttggctaaggatagtcaactgtacgtagcgttacaggctcccctttatctttctgtctcattttcttgtgaagtggtttcgactgagcgaaggcctttcacatggtaaccagtagctctcccactgacaccccaagccccaaacatagctccattgcgagggtcacatcacccctggtcactcactttgtgtcccatgtttccaggcaaacagggaagatcgagccagtagttctgccgttgctgtggttcgaacaggtgagtctatgaaggtagaagggagtctggggtctctgtatgttagctgaggcttttagttcgctttgatgctaatgttatgttaacttccggtacctaaatttagctatttgtatgtttagcctgcccatatgtatgtatgtatggttatcatgtgagtgcccggtacccgcagaagcccagagagcatcaggtctcctagaactggaattacagatggttgtgagccgtcaagtctgaaacgtgggctctcttgaagagcagccagcgctcttaaccacagagccatttccaggttttgttaatggcccctgagaggggggagtggagatggaattccgcaccaggccaccctgcaggcatcctgatctcgtcgcccttcaggtcctaagactagattctaaccagcgaaagagatgactgttaggcgaggaggcttggggccagatccacctcccattagccagtgcctcatttcatgggcgtgccaacagcaagggcgtctgggaaatgtagttctctttggacttctagccaaagcgcccgaggctctctgttctgatttggggcggggcacggcacagtgggatgggtgccttggagacgcagcgtgcagcccgacctttcttctgcagagcggagcaatgggtggcaagcccctgagcacgttctacacgcagctggtgctgatgccccaggttcttcactacgcgcagtatgtgctgctggggcttggaggcctcctgttgctggtgcccatcatctgccaactgcgcagccaggtaagtaggaggggcggccacgcctcggactcggctcgggtttcagccgacctctgtttcctgcagctagctcttgttctacctcctctctcgcaccctgcagtaacttttctctacaagtcctggaaggcccaggaccctcccaggtcggggctaggctgaggctaggtacccagtcatttggccaacaagtgggtgccacttggtgcccgctctggaaagtgcctgccgaaggtagaggtggggggtcagggctgggctggttagagaagcaaaggaaagccaggttaaaccaaacagagaagatagtttttcccaaggaaaatgctctgggctggagttgggtgtgagatggaagtgggaggagccacgtgtggaaccatgaacttagattttctaagtccagagaaaaaagtgaaagaaattagttataaattttgcttgacccaaatatatcagcatatgaggctgaagttttacatcagccatagagcacttgtttagccagtgtgaggccttgtattcaggcctcagcgctgacaggaaaaaaaaataatcaaaaataatgaaaatatttaaaaaagaagaagaaaagaaaagaaggtctggagagatagctcagtgattatgagcacttactgcttgcagggacccaggttcgattcccagcacctacctggtgttctgcaaccaactgtaacccttgttctgtaaccctagttctgtaaccctagttccaggtgatctcaaggcacacacacagtgcatatacttgcatggagaacactcatacacataaactaatacaggtgcctataatcccagcactcaggaaggaaggaggccaggggagaaggatccggttcaaaatcatccctggttacatgtagggtttgatcaaggccagcctaggatacgtgacatcttgtctccgaaaatcaattaaacttcaaaaaaagaatagtgtgggcgactggagagatggctcagcagttaagagcactggctgctcttccagaggtcctgagttcaagtctcagcaaccacatggtggctcacaaccatctgtaatgggatccgatgcctgcagagcaacagtgtacttgtatacataacataaataaataaatcttaaaagacaagaatagggctggtgagatggctcagtgggtaagagcacccgactgctcttccaaaggtcaggagttcaaatcccagcaaccacatggtggctcacaactatccgtaacgagatctgactccctcttctggagtgtctgaggacagttacagtgtacttactaaataaataaataaataaataaataaataaataaatctttaaaaaaaaactttaaaaagaaaaagacaagaatagtgtggttcagacaggggtaggggtcacttccataaagaaaggatgactgaggaatgtaacatcagggcatgcagcccctgaaagcaggaagcaaaggggtcatgactagaaccttcgttcccttctggcctcaggagtaccggctcgtgcatgagatcttggggttacgacattggtcaagtcccctggggtgcttgctgatagctgtagttgtgaagcagggaatttgaggacaggactgtgatcagctgtgattcaagagggctgctgtctgcaaacaggggagccactggccacctttgaacactcgtacaagagccactcacagggtcccacctgagatgtcctggggccacaggctgggctttctgtgcgtgcttggtgtgtgtgttgggggggtcttcccacctgctctcctgcagtcagccagctggctgcctttcttctttaaggcttgcttgcttgcttgcttgcttgcttgcttgcttgcttgcttgctttgggaagaacggatccctgtggagtccccagcacccggcttccctttccaaacacaggccccaagtctcttgtcatcaccaaggggtgtctggttgcctctggctctccatgttgactgtagctatgaggatctggaggacatcacggtctgggcttccgggctggtgttcctccctgctgctgcccagtgagaactgagccaggctttttcagtcaaccattggaggagagaccccaaaatagaaggcaggcgtctcgctggggtctgggggcaaggttgtttgtcctgcgggtttcatcagagagaggccaaagaagccttgtcctgacaaagctaggcctcacctgtgtgttcctgtccttgagcatctgggggcgggggggttaactgcttgctggtaaagaacatactcagtcatacgccattcataaatcaagagtatgttaatgtttccctcagattgacaaataccatggacttggagaagaggttaagagagagattgtacccagtaggctccaggccctaggttcaaatccagccccaccagaccagaccagagaaattcaaacactcagcaggccagtcccgctgtggccacctccgccactctcttcctgtcggtgactttctgcttgccggacttccggggcgcttcgcccacagtgcagggtggaacaagactctgcaatcttgttctcttctgtccctttgcttctggggggacccagcgtcaccccagtgacacggcatgccatataaactagcttggttgtcttccaggagaaatgctttttgttttggagtggtagtaaaaagggctcccaggataaggaggccattcaggcctactctgagtccctgatgtcaccagctgccaagggcacggtgctgcaagaagccaagctataggtgcgtaccaggtaaccccccctcttcaccccacctactcatagccagtagacctaccgtctctacctatagcatcttcctggatgttattcacatggagagcagttaccctcctgcctctcaccctcctgcgagatgggaatcttgcctcggtttcttggaccctttcagtcattgactctcatttacaaagtcctgttagaagatgacagttagggctggtgagatggctcagtgggtaagagcacccgactgctcttccaaaggtccggagttcaaatcccagcaaccacatggtggctcacaaccatccgtaacgagatctgacgctctcttctggagtgtctgaagacagctacagagtacttacatataataaataaataaataaatctttaaaaaaaaaaaaagaagatgacagttaggccagttgcttctcagtgtcctatcccctgcaggttgctaaatacaggtccctgggcatcccggaaagccaagagactctcctagcccaaaaggtttgaaaactttttttttttttggacttcaagggcatgtaaaaggacacactgactccagttcagaatagagagactgaaaatgaagacgtttaaacatcagttaagcaccagctacatactcagtcagggcctgaggatagaatttcatggtcaagtacacagggtgtgcgacagactgctcaatacagtctgaatttagatggagtcgtgtgtccgccctgtgctttgctgcgatgggtggtccaggtggtgagccaccgagtcaggtatagctggcgtcctggtttacttagtagccatctcgcaaggatccaggaccgtacttctccaagatctccaggtcctgtagggatcaaggctcaggagagaggctgagccctacagggtgtgtccctgcctgggaagggactggaagagctgtggtccctgcaatttggggttagcagaggtgagtgagtgtctcaatagaagctgctattttagcttgtgagccaacttgggtgtgagcactttcttggagggagctgggggtggggggtggaggcggggcttgggggggcggggaggggaggccacagctcagctcctggaggccagctgactatttgctgcaatgtcatttgcttgagaagcaaataaggcagaactctggtgactgtgtgattgtcctggtgagtgccacctccctggaggaggaagaagctctgcagctcagtgggtccccatatgtccctggagctgagaaagggtcctgccaggaagaggtggggagatggttagtgtctgccagtcatggtgatgtttgggtattgccagagtgcgaggggacaaatgtaggctccgagcagaggctccgcagtccctttagcccagatggagcccataggtacacagccatagccctgtccagaccctaatagaatgaacaagattgggcttacctctttactttcccagcttggtctaatcctcgtttggcttcaagattcccctgggtgccccctagtcctggccatgtgctagggagggcagtgtcctctgaggatcagctacagcacatgggtccttgcatagggacctcaccctcccccccccgaccccccagtgcctggctaagtgaaattcggtggggccccacactctgccatgcacctgggtgtgggggtggtccctagaggctgctgctgattgctatagaatggaaacagacgtgccgctagaccaaagggtattattatatgaataacgtccctctgggtggatgggcatttctgtaaggcaagggggttgggggttggcaggcagggttggctgtccggccagctgctgtgaacacagtagcctttaagaaaatgacctgatcctctgcttctttttggtctgtctctcattctgaattctcctctgtcagacacagtacagggaggagccaggacagaggaggggaaatctgcccacccgccctggctgcccagagccttgtggctttgtgtgtgttttcatgggagagaccaagctacagagttaactcttgctttattctctggcaacaagggcgttctgggccactcacgctggcttcgaacttgtggacatcctcctgcctctgtctcccgagtgcggagattccaagcatgcaccactactgtgccttgtgtccccttccccattttacttctgttttggttttggttttgtgttttgttgttttcgttttttgggttttggttttgggtttttgagacagggtttctctgtgtagccctggctgtcctggaactcactctatagaccaggctggcctcgaactcagaaatctgcctgcctctgcctcccaagtgctgggattaaaggcgtgcgccaccactgtccggccttttacttctgtttttttgtctgtccatttgtctgtctgtctgtgtgtggtgaagccagggccttttgcttagtgtagtccacctctgagcttcaccccagcacttcctgttttacttctgagtgagactatctggaatgctggggtgctgtgtcgggggtggaggagtgggatggggggtgctcgttggctttgatccaaagagaagacgcctccctgcagtttccttccctgccactagggggatcggtatgggggttgcagggcaggggtgcccagtgttcttaaacccggccttccattcattttcctaagttgggaagtcttttcaagtcagagtctcccaacttaccaagccatcctttcctgttctgcaccctttgcccaacatcctactgtccctaaggcccgaggccaccattacagcagtctggtgagagtgtgtctctcttacctctatgaacaagagccagttttaatagctgttcctggcccgtcaggtgacagcattttaaacatgtgggcagacatttaagccattcctagtttctttgtgcggcggtgttatctacccactccggactctgcccccttcactgtaacaggccagtctccctggcctcagttttcccatctctaaagggagaggttggaaccaagagacctacatgactgaggagtccccgtgtctatagagtggcatctctgggttcatggcagacagggctggatgtgtcaggaagtggtttctgtgctggtgggatgtgcggtgggactaggggaggtaggcagggcagggctaggtgacaggcttgtgactcagcttccttttttctccacagggtcctgaagacactataagccccccaaacctgatagcttggtcagaccagccacccagtccctacaccccgcttcttgaggactctctcagcggacagcccaccagtgccatggcctgagcccccagatgtcacacctgtccgcacgcacggcacatggatgcccacgcatgtgcaaaaacaactcagggaccagggacagacctgctgccaagtgagcctgatgggccacaggtgtgctcttctaaatggcctgtgagccaggctgtgggaactctagctgctgtcagcccctcctgtaggagctggccctgcccaggctcctgacttccctcaggaagtctttctgtctttctccatcagtctgaaagccttagttcccacagaggacggatctgtcactcctaggggctgggcatatgtcggcctcttgtgccaaggccaggcaagcagctccaggtcctgaccagtttgcacacacactctggagctgtatctggcgctttttctatcgtctctgctatgtcactgaattaaccactgtacgtggcagaggtggcaggcccctcagggtccttatttttcaggcatggggtcaaagctagaggtatgggccgtctacacccccccgccccccggcatctagtgtacctcaccagagggtattcggaggcccagcatcctgcaaccgaccccttttttctactggaagagaaattttatcatcttttgaaaggaagtcatgactgaagcaataaaccttttcactgattcaacaacactggcttctgtgactgttttctgggcagggctgggtctccagaatccaggccacatcagtaggtgttcccatgactgccagcgagtctcctggtgtgaggccagcaccggccactagccatgtttccacctcaaggctaatgtggtatgtggcttggatgcaccaggacaggctagctctgtcctttctctgtcccgtggaaccttctgggccttccagcagtctgtgtccaagatcagaacatccttgtgaccccaagtgacaagcctgcagcgtctgggggagggctggaagggagggtctaacttttgtcccaagttcaagcaggggttctacctggcatctctgagagtaaaaccatgttttgcccttaagggacccactaggaactgggcaatagattttcactgtgaacattaaaaactacatagccgggctggagaggtggctcagtggttaagagcaccgactgctcttccaaaggtcctgagttcaattcccagcaaccacgcgatgactaacaaccatctaatgggatctgatgccctcttctggtgtgtttctgaagacagctacagtgtactcatataaaatgaataaataattaaaaaaaaaactacatagacactcactcggtggttgtaatggtcttcacccttccctttcttagaaaagaatttgaattattgtgtgtgggtccatgccatggcataagtcagagggtgagctctaagagttggttcttttctcaccatgtgggtcccgggcatcgaactcaggtccccaagtttggcagcaagctcctctagctgcggagccatctcgctggccttgcacttccttaatgagcactgttctctacctgccctggaagcattgaaagtttcctacctcatactataaactgcattataatcgtgagacataaacttctatataaggcaaacatttttagtcttgtaagacggggtctagctttgtaggccaagctgggctggacctcatcatccgcttgccttctgctcctaatgctggggtgacaggcacaccctcaccatagccagatttctttttttccaagacaggatttctctgtgtatccttagctgtcttggaactcactctgtaggccaggctggccttgaactcacaaacccacctgcctctgcctccgcctccgcctccgcctccaagtgctgggattaaaggtgtgcaccactaggctcagattgtattatttctaggactgagaataaccagcctttctgggctacccaggttggttgtaaacttctgggctcaaggaatcctctggtcttagccttctgcgtggctgggaccagagacctctgtacctgggttcctgtgactttcctgagctagtgtctgcgcctgcttctactgcacacagacagaggacagggcgactcagaggcagacattcctgctccagagtctggaggcccaagagggttggggcaggctggctggggctctggggacgatcctcccctgccctgcaggtgcctgtgccctacttggcttttatgggtgtgtggaaactcaaccctggcccggggcctccccccaccttaatcatttcttagtgtttccccgcaaacagagccccatgggatcagatcaggtcttctttcactgggtctgagactaaacacactcagccagtaacagtgacgtcccattccactctcgtcactaagtcctgtgcaacttcatcagcccgtcatgttttgctgacagcagacactgtctcagctgaccttttctaccacacgtatttttttaaaagataaatatttatttattattatatgtaagtacactgttgctgtcttcagacacaccagaagagggcgtcagatctcattacagatggttgtgagccaccatgaggttgctgggatttgaactcaggaccttcagaagagcagtcagtgctcttacccactgagccatctctccagtccctgccacacatagtttacgtagtttccttgcactcagagttggcaaatgcatgcgcttctgtgagtttgaatgcatggtcctatctgagcacccgctgctccaagtgtgtacacagaacagggactggagctggggtcaatggcaggctagtcacctaatgtgcaaggagctttgggttggagccccagcatcaaatgaactgggggcaaaagtgtgagggagaggcaggaagatcagaagttcaaggtcatcttgctctacacagtgagttcaaaaccagcctggggctacataagacctggatgaagaaggagaaggaggaggaggaggagggggaggaggaggctgatttggtagcaaaaacctttaatcccaccactcagaaggcagaggatctatgagtttgaagctaacctggtttatacagtaaggtacagccagctaggactatgtagtgggattctgtggaaggaagagggagagggggagggggagnnnnnnnnnnnnnnnnnnnnnnnnnnnnnnnnnnnnnnnnnnnnnnnnnnnnnnnnnnnnnnnnnnnnnnnnnnnnnnnnnnnnnnnnnnnnnnaggtggaggaggaggaggaggaggaggaggaggaggaggcagaggcagcagcccggtggtggtcatactcttttaatcccagtcttgggaggcagaggcaggtggatctcttgagttcaaggccagcctgacctacagagttccaggatggcccaggttacacagagaagccctgtctcagaaacaaaacaacaggggctggcaagatggctcagcggttaagagctgaggtcctgagttcaaagcaagcagaggtcctaaattgaattcccagcaaccacatgatggctcacctgaacagctacagtgtactcatatacattaaataaattaatttaatcaaataaacaaaacaacaagaagaagctaaacttggggttcagattccacttccccagcgctacctcccccctttatctacacactgaccttcctctcagtgtgtaacatttggcagccggcaagctttgtctgttccagatattctcagaaagaaccaggcagtggggagcctgtccagttggctgcaggggctcctccctgctgagtagcgtgcagggatcggatggctgccactggttgtcagtcatctgggatatttttaccctgtgggctgacacgcccactgatctctctccacatttatagtaacccgcttgcaaaagctggttgctcaatctgcagccttctgggaaccaatgtggaaaggttccccgaccggtgtgtgtatgtttgtgtgtgtgtgtgtgtgtgtaagagaggtctgtgctgtgcggaggccccaaagccccaaaagtctagacctaggaaacagctgcttacagcaccccctgctggatcttggggaaggatcctttttggtttggtttggcctgcctcagtgtgtgtgtgtgtgtgtgtgtgtgtgtgtgtgtgtccagagatcctcttcttcaccctccctctcctctccaggctgggattacaaacacaaatgatcatgatgcctggctttcttatgatattaggacttgaactcaggtctttctgcccattttcccgttatttactgagctatctcttcagcccctcctttttgtttttgttgttgttgtttgttttgttttgttttttgaggcaggattcctctgtgtaacctggccgtcttggaactcatactgtagaccaggctggccttgaagtcagagatctgcctcctgaggaattaaaggcattgcccacatctgacttcaagaattaaattatcaaagaggaagccatgtgtctgtgagattctggacttgtctggccagtgatattctatgaaacccatgtgacacatggcccttagtcctgcaggcccttcagtgtcccatcactcctagttcttggaggatgctctctgtaccctgtcaccacctcctatgctgccagtggagggtgtgtcacctctgatcatctccagcctcaactaggcctcactttcatcagcccctctaccatagctctatcctagcctcctctgggaagcccccctatgatggtaaattataactgtcaacttgacacagcatggaatcactcaagaagaaaggctgagggagagaatccctcagagagagattgtgcatgggggcccatgtgtgggtatttgccttgatcattaattgaagtgggaagactcactctcagtgtggggcagcaccattccctaggccccgtcctgacctgtgtaagagtgaagaaagctagttaagcatgagccagcaggcagcatgagtgtgtccatttcctctctgctcctgactgtggatgcgatgtgactcactaccggagttcctgtcaggaatggtgacctcaaactgtaagtgaaatgtcccttgtttctctgtggtgctgtcaccaccgcaatagaaatgacactaggacacccccccccataactgctccctcaagcttccctcctcaacacccctggagtgcttttgtaccccagtcaatgccaggtcgctttggaatagttgagatcctaactctggttgttggagcatgtacacacacacacacacacacacacacacacacacacacacacacacaccaggcctggcattgtgatggacactctggtctgtgacccagaagcatgtccaacttcacaggaaatatctgcccaacgcctgctgcatgcttggcaccagggtcctggggtggggtgcaggtggaggcgcccaaccgacgcccttcctcccagatggctttgctatcctgctgcttcttgcaaggggcatggccgaatcacagaccttagcaacccccacccatttaagacaatacacctgagagaggcagagacaggggcttcaggaattcaaggaataaatgagctagatagcaaggtagaggccagcctgggctacatgagactcttgtcagacaaaccaaaatgaagccggaggattataagttttggaacagcctgggctgaaggtgaagccctaactcaggaaaaaaaaaaaaaaaaaaaaaaaaaaaagcaatgagcaaaagccagagtctctgcagggggcggagcagccaaggaggtggggggaacctctgtattcatgttcactccactgtcctgctttgatctgtccctgggacatttggactgtctgacaggccgttcctggctctcacatgcagcctgggccttctgttcttcccgtaactacccaggagtctttctgagatatcatcgaccacagcttgtcctttaagcacgccctttaagcttttcccaactctgaagacaacgccctcaatcctcatcctgtgcctagaggaccgacttctgggtaattccagtattgaccactagagggcggtttgcacacgtcggatgcccagtggcgcctttaagggctggccagtgtcccgttattcttgggatgtgtcaaatccgactttaactgttcacgggctggtttgggaatggctaaccttgagcaattttattttgtgagtgttccagagagcctctcccacaccagaaaaatgtctttcttaatctttagcatttgaaaaggtcttaacactaagtggcttgctaaggagccctaagctaaaacccaggtctcatgattaagattctgaaccatgaacaacagccatctgtgctgctaacctctgtcccacttgctgggctgccttggagcaattccctacatctctgagcttgccttgccattggcagctcatggaagggagcgaatattagattactgccatgcaaaacctctggcagcctctatgacgctagaacaggagatgcatggcggtgcagaactcaacagggtgaggcaggacaaccatgacattgaggccaacctgtattacatagcaattacttatttacaaaataaataagaaataaaagtgggtgtgtgcgcaatctctccggagatgggactacaataaaaacgcttggatgcccagctcccagaaagcaactattaggcacctgctatatgcggagcactttccaccctgagaaggtgcttaggttctctcattcagcaagtgtccgggtggccaccatgtgcctaatgcccttctgtgtgttgggatcgtgttgggctgggttccctagaaggagaatgggaggcagaggctggtggctaagggatgtccccgggtagagagaataagcctagtagtcaagggcagctgtgcagtaaaggctgtctatgggacagaagtataacaaccaggagcggggagcagcttgaagcagctgcaggtacagagaacggccaccaggggtcgctgtggttccagtcactagagcagagcgcctggccacagacaaaacccgcagctactccaggcttctgtggcagttttaaaaccaaggaacatctactttttgaggctctagacacgttaagcgtgaaaagcaaacaaacaaacaaatgtaacaaacccaggctgcttaagatacactgttgaatatgtttgtatttaaaaggctatccccactttttctctctctgactcttttctctcccctccccaccccactctctccacatgttcctgccggcctcttcccttccccatcctcccttctcaatcccccttcacatgcccctcttcccatgcccccaaataaactctatattatatatatatttttaaaggctatcttcagttcccatattcagatgccttgtcgtgttgccaagccatggagcttgcagacaatgtctatggaaatagcaacagttctttagcccaggaagccaggcacagggttggggcgttcatatgcatctccaaagtaggtccggggttcagtttgcacagctgtctttgggataattatgaaacggttattgggatctatgtccttgggaactatgaaatggcagatcctgggggctggagaaacagctcagacgtgaagaccactttggtgttcttgcagaagactgcagttcagttcccagtacacatatcggctcacagacacctgtaactgcagaaccagggtggtctggcgctctcttctggcctttatgggtattgcacacatgtgtgcacacattcacagataggcagacacatacgcatacacataatttttaaaataaaatcaaaatggcaggttccggccactacctacccagcgaagaccaaagctgggctctggcttctacatccctaagatgttgtcattacttgaatatttgctgtgtactagacagatggtaccacgttgaccatttgtgttcagtatttgtgacctgagagagtgctgatgtcatcattccctcgtttttacaatgaggaggctgaggcacagagagatgacggttgatagggaaacaggtttgcaccgcagcggctaggccagctcatgagtgctgcccactgttcctctctgtgcagcacccaaggactgcccgctgtgctggtgaccccagaaagagcatctcaacccaggtcaggaagtgtgaccagtgccaagggaccccgggaggcctagggaggaagggaggtcacgggctcaggccccaaactgcatctgtctagaacagagattctgaaccttcctaatgctatggccctttaatacagtcccttaagttatagcgacccccagccacaaagttatctttgatggcacttcagaactgtaattttgctgctgttatgaatcacaatggaaatactttcggagatagagctttgccaaaggggtctcaacccacaggttgagaaccgctggtctagaaggagccccatttatctggccaggctgctttggtgagggtctcagttcaggattgtccccagacaggtggcacacactgggtgaaacgaggaagagtcacatgtctaaaaatagtgcctgtctcccagagcctgtctgtcacaggacagagtggagcagctaggaggtgggaaggattctctggaatttgggggttaggtatacaggttcaggggagctgccccactctgaggtttggcagtgagctgggctggagagctgaggtactggggctacacgtggcaccattctggagtcaggtttacgccatccagtgctgtgcttttgcaggaagcatcttctatgtaggaagtggaaggagctttgtgatgtgatacccatttctctcatctactcccttaggacatgggtctccacccccaatctgcccctcttccaccaccctgcttttaccctgccctgagaccacatcgcccgccacagacagataggaaaggctttatgtggagaaggacttgtaagctgatacacacagcacacacagtgctccctctggtctccctctgtggctatggctaccatctgccctctgctgggccacaggaatgtcttctgttggaggggcagggactccgtcacgggcctctctgacccagctttgtatggctcttggccctgtggtctcagactgtgggcagcagctgtttgggggcaggacatggtttcctcctgacatcagctttggcaagggagcaggcaggggtgggaggccagccctgtggcagcaggctggatgcattgtagctccctgggcaaggctctatgaccataccgtgcccacgtataattcacaggaaagccacttcctgccccacccactccaaggtccagatgagggtgggcgagagggattttggatggacatttcgctcatggcaattggaaatggttttcagatgtatcacggaatgtggaacaaacccaggcaaacttccctgcaatcctataaatcaccagcagatggcgctattggccacacgacaggattctggcatcctggattgctcagtggtagaacttgaacctgggactgaagtagaaactctcaggccataggcttacacactgcaggtggtttacagcaggcagatgggaaaggcatgcctggcccagacgctggccagaaagggtagctgcaagaagcaaatgaggtacctccttcctaccagtacctactattcagagaggcatgttggtctctgagttcaagcctggactacgatccctcacagaattaatttcctggaagaaaaaaaaaaatcaatgcttgtccctcggtgccagacattaaagtcctcaggattggcggtggcgggctgttttgacagggatgagaatggagacacccaagagactgctggaagctcagtcaaaatgcctcatttcctgacacccgcgtcgctgagcacactgtcattgagtcaggacacgcagccacccgcccctgcagccattcatccctccccacccccaccctcccacatttcatttgcgagcccctcggtgtgcagctcggctcgtggcggctgcggcggcagagcagaaaccccaaatgatctatttatggggccgtccttccgtgttgcttgcatattgtaattaagagataatgtcagtggaatagaacgttgtcacccagtaacggcctcccgccgcctcggaaatgtcacggcaaagtcacagatatatcaagcgtaaaactgacgtttgttttcagagcagggaacgcggatcctgggacagcgatacagctgcggcttcatttctgtcttgggggtgatgaatgccagtggatggtcgggcccacaggaggaggggttcttgtctgttgcggagaccaactgggcctgtgctttgcttgacagatggaggataaggctgccctctgggtcccataatctgctgtagccaccaaggtggcccgggtgccctggctcccggctgggcagtgtgttttctgcagcccaagctggctgccagctggccgggttccccttcctgtcaccatgttgtctctggagagctaagctgctgctggggtggcatgtccttggacaacctcagtttccgagtcactcccccagagccacaaggg

SEQ ID NO: 564 - DNA, 2496 bp, Mus musculus
ggggcgggctgcccgggccatggcgcataaagcctctggccacctgcagggctactgctgctccggccaccgccaggcacacaccttgctgctgagggagtctcggcttctgtcatctctgtggcctccgtcacctctgtctccgtctccttcaggtcctgagccccgagagccccttccgcgcacgcggacatgggcggcagctccagggcgcgctgggtggccttggggttgggcgccctggggctgctgtttgctgcgctcggcgttgtcatgatcctcatggtgccctccctcatcaagcagcaggtgctcaagaatgtccgcatagacccgagcagcctgtccttcgggatgtggaaggagatccccgtccctttctacttgtctgtctacttcttcgaagtggtcaacccaaacgaggtcctcaacggccagaagccagtagtccgggagcgtggaccctatgtctacagggagttcagacaaaaggtcaacatcaccttcaatgacaacgacaccgtgtccttcgtggagaaccgcagcctccatttccagcctgacaagtcgcatggctcagagagtgactacattgtactgcctaacatcttggtcctggggggctcgatattgatggagagcaagcctgtgagcctgaagctgatgatgaccttggcgctggtcaccatgggccagcgtgcttttatgaaccgcacagttggtgagatcctgtggggctatgacgatcccttcgtgcattttctcaacacgtacctcccagacatgcttcccataaagggcaaatttggcctgtttgttgggatgaacaactcgaattctggggtcttcactgtcttcacgggcgtccagaatttcagcaggatccatctggtggacaaatggaacggactcagcaagatcgattattggcattcagagcagtgtaacatgatcaatgggacttccgggcagatgtgggcacccttcatgacacccgaatcctcgctggaattcttcagcccggaggcatgcaggtccatgaagctgacctacaacgaatcaagggtgtttgaaggcattcccacgtatcgcttcacggcccccgatactctgtttgccaacgggtccgtctacccacccaacgaaggcttctgcccatgccgagagtctggcattcagaatgtcagcacctgcaggtttggtgcgcctctgtttctctcccacccccacttttacaacgccgaccctgtgttgtcagaagctgttcttggtctgaaccctaacccaaaggagcattccttgttcctagacatccatccggtcactgggatccccatgaactgttctgtgaagatgcagctgagcctctacatcaaatctgtcaagggcatcgggcaaacagggaagatcgagccagtagttctgccgttgctgtggttcgaacagagcggagcaatgggtggcaagcccctgagcacgttctacacgcagctggtgctgatgccccaggttcttcactacgcgcagtatgtgctgctggggcttggaggcctcctgttgctggtgcccatcatctgccaactgcgcagccaggagaaatgctttttgttttggagtggtagtaaaaagggctcccaggataaggaggccattcaggcctactctgagtccctgatgtcaccagctgccaagggcacggtgctgcaagaagccaagctatagggtcctgaagacactataagccccccaaacctgatagcttggtcagaccagccacccagtccctacaccccgcttcttgaggactctctcagcggacagcccaccagtgccatggcctgagcccccagatgtcacacctgtccgcacgcacggcacatggatgcccacgcatgtgcaaaaacaactcagggaccagggacagacctgctgccaagtgagcctgatgggccacaggtgtgctcttctaaatggcctgtgagccaggctgtgggaactctagctgctgtcagcccctcctgtaggagctggccctgcccaggctcctgacttccctcaggaagtctttctgtctttctccatcagtctgaaagccttagttcccacagaggacggatctgtcactcctaggggctgggcatatgtcggcctcttgtgccaaggccaggcaagcagctccaggtcctgaccagtttgcacacacactctggagctgtatctggcgctttttctatcgtctctgctatgtcactgaattaaccactgtacgtggcagaggtggcaggcccctcagggtccttatttttcaggcatggggtcaaagctagaggtatgggccgtctacacccccccgccccccggcatctagtgtacctcaccagagggtattcggaggcccagcatcctgcaaccgaccccttttttctactggaagagaaattttatcatcttttgaaaggaagtcatgactgaagcaataaaccttttcactgattc

SEQ ID NO: 565 - protein, 513 aa, Mus musculus
APRAPSAHADMGGSSRARWVGLGALGLLFAALGVVMILMVPSLIKQQVLKNVRIDPSSLSFGMWKEIPVPFYLSVYFFEVVNPNEVLNGQKPVVRERGPYVYREFRQKVNITFNDNDTVSFVENRSLHFQPDKSHGSESDYIVLPNILVLGGSILMESKPVSLKLMMTLALVTMGQRAFMNRTVGEILWGYDDPFVHFLNTYLPDMLPIKGKFGLFVGMNNSNSGVFTVFTGVQNFSRIHLVDKWNGLSKIDYWHSEQCNMINGTSGQMWAPFMTPESSLEFFSPEACRSMKLTYNESRVFEGIPYFTAPDTLFANGSVYPPNEGFCPCRESGIQNVSTCRFGAPLFLSHPHFYNADPVLSEAVLQPNPKEHSLFLDIHPVTGIPMNCSVKMQLSLYIKSVKGIGQTGKIEPVVLPLLWFEQSGAMGGKPLSTFYTQLVLMPQVLHYAQYVLLGLGGLLLLVPIICQLRSQEKCFLFWSGSKKGSQDKEAIQAYSESLMSPAAKGTVLQEAKL

SEQ ID NO: 566 - DNA, 106938 bp, Homo sapiens
  misc_feature (1)...(106938): n = A,T,C or G
ttctaccgcagctgttggacactgcctctgagcctctctttctctcctctaattcctttcccaccacagaatcagttcctgtagtagtctgagcaggaagtggagagaacactcaaaattggggactttgaagatatatacaaaggcgcagggaaaacgaaagggagagtgaagctgctccccaccctggggctgaggggaggagggcagggagtgtcacctggaacccgggaggagagaggagtcgagagaggtctgccttccagggaccgtgacctctgctcaagagctgcagccagcctgtgtgtttcagtgcagtgcagttggggtatcacagaccaccccacatgcagtgacttggaggtgctattaatgatactattggggcaagaggtataaaccggggtgactgcaccgtctaaggtgcaggggtccctgattgtctgttccttgggcacactgagcacctccctgacacagggcctttgcacttgctggtttgtttgccagaaaggtcctccccaggttccggtctcccccggccagcccccatctccctgtggcattacctttttatttctctcattagcacgtagcaccatctataatccttatctatttatttgcttatacatatatttatagataaataaaaaaacatatatatattttaatatctctctctctttcccttactaaaaaggccagggcagaccagacgtggtggttcacacctataatcccagcactttgggaggtcgaggtgggaggatcgcctgactccaggagttcgagactagcctgggcaacatagtgcgacacccatctctattaaaaaaaataaaaattaaaaaaaattagcttggctgggtgcaggggctcacacctgtaatcctagcactttgggaggccaaggtgggtggatcatttgaggtaagagttcaagatcagcctggccaacatggtgaaaccccatttctactaaaaaatacaaaaattagctgggagtggtggcaggcgcctgtagtcccagctactcgggagggaggctgaggcaggagaatcgcttgaacccgggaggcagaggctgcagtgagctgacatcacaccactgcactccagcctgggcgacagagcaagactcttgtctcaaaacaaaacaaaacaaaaaattagctggtgtggtggcacatgtctgtaggaggctgaggcggggggatcgcttgagcccagggggtggaggccgcagtgagctttgaactccagcttgggtgacagaaccataccctgtctcaaaaaaaagtaaggccagggcacagaggacctgcctgctttcttccccatctacccccaggccctagcacacagtaggcctgatacatagcgagtgctcagcaagtatttgccacataaatgaatgaatgagcatgtccatcccttctctggtaggtaggacaggaccaggtggtctcagaggaatcttctggttcctgggataggaatcatcctcctttctccagctgctgttgagagtggcagctgatagaaacttctgtcctccagtgacctggcccacggagcaacgtattagctcgcggctgccagctgggtcctccccacacacttgcacctttgtcctggaaagcacgtctgtgttggagggttagcccttgccagagaggacatatcagagtccccaaaggccagggacaaaggcaaggattgatcgccagccctgagtcagagaggaaagactcctggagggaagtcagtgatcggggactcagaaaggcgtgattctgaaggaagacaggatttacagggcatctcagtctgctcaggcttctaaaacagagtaccatagacggggagagcttacagacggcggacatctatttctcacatttctggagggtgggaagtccaagatcaaggcgccagcagatttgatggtggtgaggccctgcgtcctggttcacagatggcagcttctctctgtgtccttgcctggtggaaggggagatgcagctctctagagcctcgtgtgtcagggccctaatcccatcgatgaggcctctgcccccatgacctcgtcacttcccaaaagccctacctcctaataccatcacatagtaattaggtttcaacgtacaaatttcaggggacacattcagactctagcaccggggctaaagtccaggggcagaggctaagtttctggaggggctgtttaggggctctggagaccttctctgatattcacaatattgcagggggcattttgacctactgaagagaaacagctcctaaaaagtcacttgtagcaacatgagagattcgcattctgattaaaatctatgcaggcacctcctgcctcagagtcgttgccctggctattccctctgcctggaatgttcttccctggatctcaacacattcctgcacttcctgcaggtctttgcccaaatgtcaccttctcactgaggctgtcttcaaacaccccatttaaatggcaacccctctcccccagtagcatttacactgttctgtttttcccctaaagcacgcatcgtcctctaactgcctgtcccatggaaatgcagcatgcacaaaccacacacacaattttaaaaattttatgacagaggaacctgttctgaaaaaagaaaaaaaggtaaaagaattttaggggtcatattttaaaaagtaaaaagaaacaggtgaaattaatttaacttgtaatattattcaacccttggtcagtgtgtgtggatgaaccacgtctaccagagtccaaggtaaaagcctgcctctgccgccgggccacgcagctgcctggcatggtggcctggggcaagttgctcagcctctctgtgccccggctcccttatcggtgatattcaaatagtgtcatttcaatgtgtaatcaacataagaatattgagatgttttacgctcttttcatatgaagcctttgaagtctgggatgtatatgacatggcatatctcattcagactagccccgggtcaagtgtcccatagccacatagggccagtggctactgtattggatagcacagctctaatatctttttgttttgttttttgagatggggtcttgctctgtcgtccaggctggagtgcagtgatgccatcttggatcactgcaacctctgcctcctgagcttaagtgatcctcccacctcagcctcctgagtgtctgggaccacaggtgcgtgccaccatgcccagctaatttttttttttttaatttattgtagcaacagggttttgctatgttggccaggctggtctcaaactcctgagctcaaacaaagtgcctgcctcggccaaagtgctgggattacaggtatgagccaccgtgcccatagctctaacattttataaaatccaccaatgatgatgtttatcactaattgttattgcttgtctattaacataccggacccgcaaggctaggggcttgcttatggtccctgctgggtccccaaacgcccaacatagtgcccagcacagagtaggagctcaatgtgaactgaatgaatccagcaggcacacgtgagctctctttcctccctcaccagcagcaatccaggtggcagatgtggctacaatgctttcctggctgggcgcggtggctcacgcctgtaatcccagcattttggaaggccgcggcgagtggatcacttgagcccaggagttcgagaccagcctggccaacatagtaaaactgcatctccattaaaaatacaaaaattggccgggtgcagtggctcacacctgtaatcccagaactttgggaggccaaggtgggcggaccacctgaggtcaggagttcaggacaagcctggccaacacggtgaaatcccgtctctacaaaaatacaaaaattagccaggcatgatggcaggtgcctgtaatcccagctactcaggaggctgaggcgggagaatcgcttgaacccaggagaaggttgcagtgagctgagatcacaccattgcactctagcctgggcgacagagtaagacttcttcttaaaaaaaaaaaaaaaaaattagccagtcgtgtggcatgcacctgtaatcccagctgctcaggaggctgagacagggagaactgcttaaatccgggaggcggaggttgcagtgagctgagatcacaccactgtattccagcctgggccacagagcgagtctccacctcaaaagaaaaaaaaataaggtttcctcttcctttgctttttattttgtcctttctcgcacccgtctctttgctttccttcactttcttcctctttttcctttccctcagcaaacagcgtagtggtcatgtgtgtggcaagtcactggttcacatctctgctctctgctcgccaggagccagctgtgcctcctttaaggaagcccttcagcttccattcactgtgttctattgccgctggggatgagcgtgattcttcccaggctggggtgggaatgcggctgcctgcaggaggtgttggctccgcctcacacaggcaccttgctaagcatatgaccaagatgagcccatgtaatcctcatgaccaccccagggtgcaggcatgaatgactcagaccaatcccaaggcaccgataagggagccgaggcacagagaggctgagcaacttgccccaggccgccatgccaggcagctgcgtgttccggcggcagaggcaagcttttaccttggactctggtagatgtggttcatccacacacaccgaccaagggcctactgtgggccacgtgctgttggggagccgggggcactgcaatggacgaaacaggcagattcctgccccgtggagctttttttatcctagaagaggaaggaagccaatcaaacaagcaaacacccgccctggagggcggtcggtgcacagagagaaatgaagcagccaagggggatagggagggtcctatgggtggtttgtaactttcaaagggtgggcaggaaggaagtcattgctgagaagatggcattggagcaaggacctgaaggaagggagggtgagtctcctgggtgttagggagaggagcattccaggaggggaccagggagtgcaaaggttctggggcacgagccgggcaacaggtggaggagctccaggaaggaggatgtggctggagcagagtgggcaaggagagggagggggatgaggtcagggagatgtgcccatctgggtgcgttttgactttgtctctctagtatgagatgtggtgatcttgtgggccatggtgagggctttggcttttatgctgaatgaggtgggagccacggaaaggtttctttctttttgttttcttgagagacagggtctcactgtgttgcccaggctggagtgcagtgacacaatcatagctcactcactgcagcctcgacttcctgggctcacgtgattctcccacctcagcctcctcagtagctgaaactagaggtgtgtgccactttacctggctaactttttattttttgtagagatggtgtctggctgtgttgcccaggctgatctcgaactcctggcctcaagggatcctcctgcctcagcctccaaaagcactgggattataggcatgggccaccatgcctggccatttctttaaaataacagttttcattgagatataatttgcatatcatacattcacccatttaaagtatataatttggccaggcatgatggctcacacttgtaatcccagcgctttgggaggccagggtgggaggatgaccagaattttgagagcagcctgggcaacaaaagtgagaccctgtctcaacaaaaatgaaaacatcaggtgtgcatagtggcatatacttgttgtccaagctagtcaggaggccgaggcgggaggatggtttgaacccaagacttcaagactgcactccagcctgggtgacagagtgagacctttttttctcttgaaaaaaagaaaaagtaaataaagtgtgtaatttgatggttttttgtatattcacggagttgtgcaaccatcattaccatcacttttaccgtcacttttagaacattttcaccactccaagatgaaaccccaaacctgtagcagtcactcctcattctccccagcccctggcaaccactggtctactttttgtccccatagatgtgcctactatggacattttatataagcagaatcatacatgtggcctttgtgtctggcttctttcacttatcaatgttttcaaggttcatccatggtgtagcatgcgtcagcccttcattcctttttatgctgagtcatattccagtgcgtggttatgccacattttatttacctattcaccagctgatgggggtgtgggttattttcactgcttggctgctgtgaacatttgtgtccaggcttccgtgtggacatgctctttcctttctcctgggcatatacccaggagtggaactgctgggtcttaggggacccctatgtttaccttttgaggctgcaccattttacaatcccacaagcacctcaagaggcttccaactcctccaggtctttgcctgcagtcattctccgtctttgatcacgaaaggactctgagcagaggaggaaaagcatctgacttgattttccaggagccctgtgacaccatgttgatcatattttgttatcaacactctttcttttcttctgtatcttcgactttccccagggcaagacctctctctcaaacatgacgaagtctttttttcccttcttaagctgcctccctgccaccggaagtgactcccctcagcaaggccaaggtggctcacgtgtcccatcaccctttcatctctgcccttctctctcgagtgacagcatggcgtgacatgagggctctccagccatggccttgcagccctcttgggtaagcatcacgtacatttggaccttgaagacttggtcatgaatcagagttagattgggtgagatggtcaaggcaggtcagtatcaaggaagtggaggagggtgtcagggccaggcagaccgcagattttagttaactggctaatttccgagaactacaaaagtcattaaaaaaaaaggcaactgcatagctgaaggctgttgaaggccttaaggaattcaatgaagtgatattaattaattaatcaatcgatcagttacttgattaattaatgagttaattagctgattgagtaaagtatttattgagtacctgctatgtgccaggcatttttccaggtgctggagatacatcgataagcaaaacagggtcagcttctgtctctcgggagctggaggagatgaacaaggaaacagatgagaccatttcacacaaagcaaggtggcctgacagagtgggctgggactcctgttttcgacagatgcaacagcaaaggcttctctgaggagtgggtttcagctgagcccagaagaggagagtggggagccatggaaggatccaggggaagcgtatcctagacagaggaacaggaagtgcaaagttcctgacacaagaaaaagctggggatgctcaatgaactgaaacaatgggggagagggcaggagatggaggcagagagatgggcgggcgccagttcatgtgggtccggaaaataacgacgacactccccagctcagttgcactgacacattccagggactgttctaagcactggcacattttttgacttgtttaatcctcatggtagcccttggaaaggggctcttctaatccccgtttcgtagatgaggagactgaggcacagaaaggcccaaaccacttgccccaggactccaatgtgggaaaccccagagcctggatttctctgaacctgtcccccggggctaccacagtctcacctcagccactctgacctccctcaggagttgggccctgccccttggggcactggaccatattcggcctccttagaggaaggcagtgccaggcaaagctgtctaacgagaacatagcaggtgctctgtaaatattggttcaggcgaagacatgttgcttaaggatggccctgcgagaaggctgctttcttctggagttaaataagaggtttagaaagcctccctcggagcactcaaggactgagcctgccttacccatgtgctggggacaccaccctcctgtccctgtgtaacccaggagtctcttctcagtaacttcattcagaaaatgaggggactggccagcacttcagggaccagaaggcaggccaggtggggtgtggtggaggacttcaggggggcgtggagggcttcagggatacactcacccatctaagggcaactgccacttagtgccagcccacttctctcccttttttcttttttctttttcccccagggtcttgctgtcacccaggctggagtgcggtggtaagatcagggctcactgcagccttgaactctgggactcaagggatccttctgcctcagcctcctgagtagctggggcgacaagcgcatgccactgtggctggttaatcttttcattttctgtagagactggtctcactatgttgcccaggctggtctccaactagtggcctcaagtgatccctcacctggaccttccaaagtgctgggattacagttgtgggccaccatgcaccgggcctgttctgttttcttggagcacttgcctgcaattatccttcattcatttgctcacgtgctcatcattggtttccctcttcattagaaagtggggacttggtttgggttaactaagcttccctgtgcatcagttttcatttctttctttctttttctttttcttttcttttttttttttttttgagatggagtttcgctcttgttgcccaggctggagtgcaatggcgctatctcggctcgccacaacctccgcctcccgggttcaagcgattctcctgcctcagcctcccgagtagctgagattacaggcatgcgccactacgcctggctaattttgtattgttagtagagacggggtttcgccatgttggtcaggctggtctccaactcccgacctcaggtgatccatgaagtccacccgcctcggcctcccaaagtgctgggattacaggcgtgagccacctcccagttttcttattgtaaaatggagccattgtgtgcaaagcactcaggacaggggccagcacctagaaggctcctcagtcattcattctagaatatttactgtgagcaggcattccctgccaggccacgttctagagctcaggacgcgtgggggggggggcccgcctcacgggttggcatcccagttggagcacatggtcagaatgcaaggacgcaaatgaacgtgaacctgccagggggtgctcagtcatagggtgatggtggcaccagcgttacgaaggatagggccaggcggatacctgggagaacagaattgcctgtgcagggtgtatggnnnnnnnnnnnnnnnnnnnnnnnnnnnnnnnnnnnnnnnnnnnnnnnnnnnntgtgcagggtgtatggaggccctggggctggagcctgcggggcttcttccagggacagtgaggctggagatggactgcggagatgagggtctagaaggtggtggcggggcatgtggaccgttgtaagggctctggggttcctgggtgggctggcgaagtcctactcacagtgaccaaccatgatgatggtcccgatagaggaggagagggaggaggagggaaaaggaagggtgaggggctcagaggggagagctgggaggaggggagacataggtgggggaaggggtaggagaaaggggaagggagcaagagggtgaggggcaccaggccccatagacgttttggctcagcggccacgaggcctcctcagctcccgccccaaaacggaagcgaggccgtgggggcagcggcagcatggcggggcttgtcttggcggccatggccccgccccctgcccgtccgatcagcgccccgccccgtccccgccccgaccccgccccgggcccgctcaggccccgcccctgccgccggaatcctgaagcccaaggctgcccgggggcggtccggcggcgccggcgatggggcataaaaccactggccacctgccgggctgctcctgcgtgcgctgccgtcccggatccaccgtgcctctgcggcctgcgtgcccggagtccccgcctgtgtcgtctctgtcgccgtccccgtctcctgccaggcgcggagccctgcgagccgcgggtgggccccaggcgcgcagacatgggctgctccgccaaagcgcgctgggctgccggggcgctgggcgtcgcggggctactgtgcgctgtgctgggcgctgtcatgatcgtgatggtgccgtcgctcatcaagcagcaggtccttaaggtgggtgagggagaccccagggggtccgcgcacggacccgggctgttgggcgctgggcgccgggaggacccgcgcgttgcggtgggtgggcgaccgcagcggaatcggcgcccgggcctggcgccgcagagcacgagggaggccaggcgcttcgggaggggctgctgcccgcctccccaccaccctcaccgccccagactgaggctaggggggaacccaggggctttgctggaggcgcaggccagggttggggaggcctggacgggagaccacccgggcgcctgacccgccctaaagggtctgggcgcccacgacggatcaggagtgtggacaggttgcttccgtggtgccgcccgaaggagcccaagagtgtgtgtgaacgtctgctttcacagcagccggtagcagggtccggtaaaattagagctgcactttgcttgtatcctgtgagcccaggaggacaggaaccttctgtgagacccacgtgggtgcccagctcacatggtaggtgctcagctgagcatcctccactgcccagaatctccccataggaaccctctcccagaggcagaatgcgcgactctgttctccctgctcactgcctccatgattcagtctggaaactataagccgcttttctccccagattcatgcagaggcaggcagcagcccaaggtcctctgagtgcacgcagccttaggtctttcctctgatcctaactttgcataccattgccctttcaaccagggagacagattaggcggtcagctggtctgcagacggacagactctgccctgggtgcctgggtggcctgtttgaatgagcctggagttaggggaagggctgggagattgcagagtatcacatttgaactaaaagccatttagagttttgaagccctggaacccacacatgcagtggcggggaggggaaactggggctcactcttatcaaagttctagccagatgcagagctggggtgaagatgtggacattgtcactctaatggacgtcttttccccttggcctgcctctttggactgggtttcttaagaatggttccttgtccacatttcatgtctgttccctcattcacagagcgaatgaatgagtgaatgaatgaaggatctgcttagatctggctgccacacttcttgggacccagctagctggccttaaagatggagcaacatatggtctctctcaaggtctctgggtgagcagttgtctagggcatcttagccacgttgtgtctatttttgatttttcaaatcttgtcccgccaaagcctgtaatctgactgcaaagaggtcccggtggatggtgacactgtctctggggatggcaggaaaatcagcagaatggcctcttctcccccatgacagctcagaggctttctctgttacactgagggagctttatttttctgtggcctactcatactgaaacgtgtgtgtcagtgacagccttgtggctgctgcagtgccaggaccccactgtgtgtatgcagggtccctagaggggctatcactcaggcagttcaagcatgtgaccctgtgctgtgagtgagcacctggtctcttgctatgggagtgtggggacttatgccaggtaaagagtcttgccaactcagttattcgggggcttatttcaaggtgttttctttctcaggatgtcatcaggttaagtatgtcagtagggtgtgtgtgtgtgtgtgtgcaccacacatgcatgcaccaccaaatttccccactcctctcctgggcttctaaagaggaaaaccacattgtcctcaattgtcctggagctaggagcatctggcttaaagttgaacaggagcctcccagcatccttctgtggatatcccaaaggcgattggtttggggccgagtggtgtgaaggcaggaagacacgcccagcccaagacggccacttctggaaccgcccaggctggagcagcggccaagtgccttagcatggaagaagagagcctgtgttcaggggaccaggcgggtgagacacacgcataagcagggactgcccgctggtgttttctttggctacatgagtctgtgtgcaacttgaatgggaggccttgtgcttttatttttttttttaatatgctttttggttaacaacagaagtccctacagttggccctctgtgtctgcaggttctgcatccgtggattcaatcaactgcagatgaaaagttttcagaaaaaatccccccaaaataacaatacaactaaaaaaagacataaaaacaatactgtataacaactattgacatagcatttacatcgtattaggtattataagtaacctagagatgatttaaagaatacgggaggatgtgcataggtgatatgcaaataccacagcattttatgtcggggacttgagcatctgcagatcttggtatctatgggggtcctgaaaccaattcccctctgacattgagggacgactttatataaaatatatgaatacttgctcgtaaaaaaaagttcaaatggaggaaaagagagaaagtttcccccattttattcccctcctgagctattatcaccatcattgatgtggatctttctagacccttttctgtgtaccaggagcctgtatgtatacatattaatatatattttacataacttgaactaagtgtaggtgaacttgaacatgtataattatcttgcaatttgtttttcaattcaaagataccagctgaaaaattttccatgtctcagcaataagtctaccccgcgttttccttcatcactgctggtattcctttgaatggttatagacttgtttacctgtttctccattgactgatcattttctctgtcacaaatgacagcgatatcccgacacatccctcttcgtgtggttcatgaacatttccatagggtggatttctagaagtggggccttgggagcaggtgtgctcagtttgagttttgatgattacggccaaattgcccttctgcacagctctgttgctgcatccacccacaaggtatgggactgtgctacttcccctatctctgccatcactggtaattactgatttatcattaccattttttggtagccaagttcccgtgtgtctctggtcctccaaggaaggcccagctggtggacatgggggagaggcccctcactgcagctgggctgcaaaaaagggatgctcatcttccgaggctgctgtcttcaatgatgagctggggtgaagatgtggatattgtcacactagttgacatctttttccctttggcctgcttctttagactgaatttcttaagaatggcttcttgtccacatttcatgtctatgtccttttcacagaacttggatgtgtgcccccagggatctgaaccatgtcttcattattcaccggatcacctgaggtcaggagtttgagaccagcctggccaacatggctaaaccctgtctctactaaaaaatacaaaaactagctggacatggtggtgcacgcctgtaatcccagctattcgggacgctgaagcaggagaatagcttgaacctggaaggctgaggttgcagtgaactgagatcacgccactgccctccagcctgcgtaatagagtgagactccatctcaaaaaaaaaaaaaaaaaaaatgaaggaacttagaaatatgtctcagcatgggtaggccataaaaacacattactaattgaaaaaagctctggtgctatttatgtttaaaaaaaacccaccaaacaatattctatattttctttccatttttatttttattttcgtagagacaaggtctcactatgttacccaggctggtctcgaactcctggccttaagtgatccttctgccttggccttccaaaacactgggatgataggtgtgaaccaccgcgccctgccattattttcaatggcttaatattagaatatgttaaagtttgggaaaaggtgagactaacagaagtggccactctaatgagagaaggcaggacactgggggtgtggccaaaggaaacctaatactttatctgtaatgctattttttttttcttttttgagatggagtctcgctctgtcgcccaggctggagtgcagtggcacgatctcggctcactgcagcctctgcctcctgggttcacaccattctcctgcctcagcctcctgaggagctgggactgcaggtgcctgccaccacacccagctaattttttttttgtatttttagtacagatggggtttcaccgagttagccgggatggtcttgnnnnnnnnnnnnnnnnnnnnnnnnnnnnnnnnnnnnnnnnnnnnnnnnnnnnnnnnnnnnnnnnnnnnnnnnnnnnnnnnnnnnnnnnnnnnnnnnnnnnnnnnnnnnnnnnnnnnnnnnnnnnnnnnnnnnnnnnnnnnnnnnnnnnnnnnnnnnnnnnnnnnnnnnnnnnnnnnnnnnnnnnnnnnnnnnnnnnnnnnnnnnnnnnnnnnnnnnnnnnnnnnnnnnnnnnnnnnnnnnnnnnnnnnnnnnnnnnnnnnnnnnnnnnnnnnnnnnnnnnnnnnnnnnnnnnnnnnnnnnnnnnnnnnnnnnnnnnnnnnnnnnnnnnnnnnnnnnnnnnnnnnnnnnnnnnnnnnnnnnnnnnnnnnnnnnnnnnnnnnnnnnnnnnnnnnnnnnnnnnnnnnnnnnnnnnnnnnnnnnnnnnnnnnnnnnnnnnnnnnnnnnnnnnnnnnnnnnnnnnnnnnnnnnnnnnnnnnnnnnnnnnnnnnnnnnnnnnnnnnnnnnnnnnnnnnnnnnnnnnnnnnnnnnnnnnnnnnnnnnnnnnnnnnnnnnnnnnnnnnnnnnnnnnnnnnnnnnnnnnnnnnnnnnnnnnnnnnnnnnnnnnnnnnnnnnnnnnnnnnnnnnnnnnnnnnnnnnnnnnnnnnnnnnnnnnnnnnnnnnnnnnnnnnnnnnnnnnnnnnnnnnnnnnnnnnnnnnnnctgcctcagcctcctgagtagctgggactacaggcgcccgccaccgcacccacctagttttttgtatttttagtggagacggggtttcactgttttagccaggatggtctcaatctcctgacctcgtgatccgcccgtctcggcctcccaaagtgctgggattacaggtgtgagccaccgcgcccggccaaaatcccatctcttaaaaaaaaaattacgaatgaacagatacatagttttcctcaaagactggccagatgaatgcgccacacagaccgatgaggcacactgcaaaggggccctgtggtcgaggttgcttggagaggctttggggaagcgcaactcatttcttttcccttctgccagtgggtaggattggagagaggtgtttggacaggcacactaagggccgtgattgtgaacttcatggcatccattcatgggcagcttactgtgcaccaggcagggttcaaagcacctttgtgaaaattgtctcatttagtccctgcagagggccgtgacatatgatttattgtcttcagtgtccgttaaggagacaagctgaagagagtaatttgccccaagtgacctcgctagtgtatgtgtgtgcgtgcatgtgtgcacgtgtgtgtgtgtgtgaaggtgtctgtctgtcccagaggcagatgccatgagaatggggactcttgctcccattgccctggatctgagcctggcatgcagctgtgctcaggtatgtgggtgagtaacgaaggcctggttcaggtcctggggggcacacatccaagttccccgtatgtgctctggtcctccaaggaaggcccagctggtggacgtggggagaggcccctcactactgctgggctgcagggaaggggtcatcttccaagaccaccatcttcaatgataggcctcatggccttcttccatgtccaggagagaacctgggtcccctctgctgtctttaagttggttttctagatggactcaacctcggttgccttgtcctgctgctgggcttcccccacctatgatccctgtctcaataaacggcacctccttttgtttcccctggggtagaggcaaaaaccttcggtcatctttgcctgcatgcttttttcctgatacccctgtatctgctgaggcaggggctttcccatcactgtcactgcagcgtccccgagggccatagcagcgcctgagctccttgccaccccttcaacaccagtcaggttacagaatgaatgaggcgggcgcgacccccagccctggcctcaggctctttagctcacccctgcctccctcagccagagccacacagtgagccttggggagccccggcaccagggccagccagggatgtcaccggctgtccctgagtttgtgccttttgggaaatctttgtcaatcagttaaaagatgggggttgatgggagataacagtcaatgggcactcgttgtggccggatactgttccaagtgtttatgtgcattattcattttagtatctaaaataggtactattgtgtcttattttattgagggaaatggatgcacagaggcggaaagtaacttgccccatgtcacatagctccaagcggttgaatcaggatttcaagtctgggggccgactccacagctggtcccggtggcctctgcgcactgcgtcctcccggttctccgtgtgtctgagcaggtcgactgcatgcttaaggcgggcggcggggggtgcccttcttatattctcttcctgggctgccccttccttttctgtgcatcaccagggaacagcagggtcccttcgaggctttgtcctaatcatcaccccgccaaactttgctggtgcagagtgcaccctggcctctcccttccgggggtagtctgagaccagggacatgttctccaatcaaaggcaccaagtgaggctcccggggaggccacctgttcctagcccagggctcccagtgaccccgggggctggactcccacccatcctgcaggggccgcccgctctgcgcctttatcagcccccctgcggaacctgggggggaggcccagtgtctccacctaccgggcgtttcctgtaggacccccttgtttggacatgtggggcaaagccctagaactgatcactgggcacaggtggggagggggctcctcgaggacagcttggatcacaggtgtgtgccaattctgttttgtttttcttcctctttcctgccattgaacttcctactccttctagcatgtgagagacagcttcaacttactccctggcgacggctgaaaaacatgggctatttttagtttgtgtgagtctagtttatttgctcctggtagatttgcctctccctgtcttcgtgagtgtgtgtgtgtttgcacacacgtgtgttggtgtgtgtacacaagtgctgatggtgaaaacagtgacacacacacctgtgtaggcatgcacacacctgccttgatgtgtgacgacgtgatgatgtgtatgcagacacctgtgttgatgtgtgcctacatatgttgacacaggcacacatggtgtgtctgtacatgcaaatggacacacatgaacacacgtgtttatgcatgtccttgtgtgttgatgtgtctgcacatacatgttgatgtgtcccgctgtggttggcctttctggggccaggcccagcacctggggtttccaggaaacattccctgtcccttcccggaatggccggtacttgctgtgcctccgccgggagatgcaccctgattaactagaacgtggcgaagctcagccacctggaatcgccttaccctggcctttggtttctagcaaatgggatggaagtgagtccccatggagggcttgctccatgaaggtgtttttcctggatgagtcttggtcccagtggcgatttgctgcaggcttgttggcactgtcattcgtgggtcctgcatggaggttccttagtgtccagagggtgattccatgtctgtggtcagcaaaagagaggcccctggggccataagccacaccccccaaggctgaacccagagagtttgtggtttaaatcttgggcctggaggattctgtggaggagagttcggtccaggccttctgctccaggaggcgctggcagctccgacaccacagacacattaattgtgcggagaattcaacgctagggctcagtcaaaaatcaaaaacgcaaaacaaaaagagaatcccttttatttacctcgtctccctccccctgtttggacatgaccttgagctctgctggcccacaagtggccaggctggagctgtcttgcaaagagaaacaaaaacaacacaaaaagctgcgttcttgactttgaagccttaaagggcccaggggctggctccctgtgggtgttgggggcgattttcctcccaaagcctgcgtgagatatggagacactccgcctgctcagaagctccccaggtcccgggttccaggaagcctcatggcccaaggcctggccgtcttaattttcttgttttctttccctccactccactgtttcttcctgttcactgattgcctgtgctggggagggggaaggaacgggaggggcctgaccttgttcacttcctggcattttgggtgaagttccttacaccttctctggaagcttctagaaggacccttgaggcgctttaaatctccattctctgggttttcctcccaccttcctggctgctctgtcttcttgcctgctgatgcctcctcatctccctggcctcctgcctcctgctggtggagctccaggcatcctttctgtgtgtcctcatccctcatccctggggtgggctcctccagccttgcgcctgaatggcatctctgtcctgaccactcccaaattggtatccctgggcccagacctttcccctgaaccccacccccgagtgtccaacagcagagtccgtatctcaactcggggtcaaaggcagctcacgctcgccccggctggctcctcatcaccctcggccacacctgtggctcccaccagcttcccactccatcatagcccccccatcttccagttgcccgggccaacatcttgcactcagccttgactctgttctctccacttccctcagagaacccgtcagaaagttttctagcttcatcatctaaatatacccagattccaactacttctcaccacgcccgaggcgccatcacctctggtccaaggcaccatcacctctcccccagattcctgcatccgcctcctcactggcctccctgtgctcatccttgctccccagtggggtttctcaataagcagccatgggagcccatcaagattgcacttagcacctcctcccctcaaagccctgacatggccagacccgtcccctaggagtcacagccaggtcctaacctggcccagggcctgtgccatccacccctgccacttttctggcgacgtccgcattcccttttcccttgcacaatggcctcctggccattcctcagccccatgggcccaatcgccttagctctcctgacacaagccctctcatctcccgtaggtctctgttcagctctcacttgctcacggagaccctcccctgattccgtttgtgcatcatgcaggttcccccttgtccccctgtgctgccagccctccttacccgctctgcttagacctgtcagccactgtagataccctggaacttccctgggtatcatgttgattgtttattgtctatttctccccatgagaatgtcggactgtgagggcagggacctttgtgttattcgttgccgtgacccaagcccctggaacaatgcctagcacataatcgcaggttctcaaatatttattgaaaggatgtttaaaagacaagggttgtttcacaggatggttcgtgaccagtggcaggttgtggtcctgtgcagggcaatggggcctactcctccacctgccgtggccgtcgccccagaccgagctgccaccgttgtttcccagtggatgctggagtgtcatcatggggctgtttgctctgctgatttataccacactgttgtcacttctccccatcaaagccaggatgctctttaaaacatgcaaattgggccgggcacagtggctcatgcctgtaatcccagcactttgggaggccgaagtgggtgggtcacctgaggtcaggagttcaagaccagcctggccaacatggtgaaacctcatctctactaaaaatacaaaaattagccaggcgtggtggcatgtgcctgtaattccagctactcgggaggttgaggcaggagaattgtttgaacccgggaggtggaggttgcagtgagccgagattgcaccattgcactccagcctgggtgacagagcgagactccgtctcccaaaaaaaaaaaaaaaaaaacaaaactatgcaaactggatcatttcaagaagctgaataaaatcttcctgcatttggtatcaaagctgtgagcctcattttcgtgggccctgcccatctcaactcagcattctcaccccactgcaacctcacaggccttccttttcctccaacgtgtcacatgctgtcctgcctcagggcctttggaagtgcttttctttctgcctggaccgtctttttgtctccctggctcttatgcttggttcctcttttatgtttaaatgtaaccttttgaagcttaaatgtaaccttttgaagaagacaccccgtgattgcccaccccacccaatggacagttgccccccacgtccactgtctgtgccatctgtgtggtttttcagctggagggcaatggccccatctcggctcactgcaacctcctcctccccggttcaaacgactctccagccttgcctcttgagtagctgggattacaggcgtgcaccactatgcccagctaatttggtatttttagtagagatggggtctcaccatgttagccaggctggtctcgaactcctgacctcaggtgatccacctgtcttagcttcccaaagtgcttggattacaggcatgagccaccgcgcctggcttgcgccatctgtgttataaccacaccatgctattcccttctgagcccttaatagtctctgaaattatctcatccacttgtgtgagttccatgaggacagagactttatctgtctcgttcatggctgcattccatagttggagacccttgtccagggcagagaaccacctagcgtaggaccttgggctaaggcagagaggccccagtgggggtcctccgcagcgtggactttggaaccagactccctgagttcagcagtggctcttgcacttcctgtctctgtggctgtgggtgagttgcataaccctgccgggcgtgtttctccgggcctccctcctcgggctgtagcaaggggtaagggaggtcatacgccctggggaacaccccaaagcctgggtccctgggatgcatccacagattgtaggcctgagtcttaacacactccatctggatttcaatgacttctgcctggttccagtgctgggctgtttccctgtctgagctttggtggcttttgattgacccctttcctgccccagcatgaaggtggagtagccagaaggaagggatgcgggtgtataaagatgtcatcggggctgtctgtggatggtgggtaaagagacagcacctgtcatggtggaagggccacaggaagcgtggaggctgtttctggggccacctcctgcctccaggaggaagcagggatcctcctgttggcatcttggtcccatcaggtgtcttggatggggctggggctgggagtgtttctctccctgagcatttaagccaaggttcattatttagaatggaaccatttataggccgggcgccattattacattattcctaaagtgttaggattacaggtgtcatgcctgtaatcccggcactttaggaggctgaggtgggtggatcacttgaagtcaggagttcgagaccagcctggccaacatggtgaaaccccatctctactaaaaacacaaaaattagctgggcatggtggcacacacctgtagtcccagctacttggaaggctgaggcggaggactgcttgaactcgggaggtggaggttgcagtgagctgagatcgcgccactgcacttcagcctaggtgacagtgagactccatctcaaaaaaaaaaaaaaaaaaatggaatcctttatgtttcactttgttctcattagcaggactgtgcgaggctgagtcaggagaccgaggtccattctgcttgtgattttgctccgtgcaggaatgtggaggtgtggcccataagcatgtcattcatgcaaaatcatctacatgcattcaattagaaaaaaaaaggaaaacagcagtgaccctcataagtagacttggttagtgtcaatgtagggagtgagtttcttgtgaccctgctgttcttcctgggtcccgtgacagggcatctggacaggctgaatgcgattctagaattagattcctatgtttttatatgtacgccccagtctcacttgccagtggcttcctctgacgcttagaaaataaatggcatctgcaccacgtcagggagaaactgactgctttggaattcccagaagctcttggaagggaaccttcctgagggatattgaaggagaattaaagaattttctcagtggctggcacaacttatggagtcaatgctcattggctgtgattggctgagctgggatcacatgtgcatccttggaccaattgctgtggctcgagtaatggactgctgtgattggtcagccttgggtcgcctgcccatttggagccagggagggaagtagttcttgcccacagagactcaggtaggagtagggtggttcccaaaaggcaaaaaggaggggctgttgtcgggggaagaggcggccataggcagcaaaaatggggctgagcccctttgcccccaggtagcttcccacttcatccccacattgcctttcactgtctctggctgttacagtattagagattattttgtttggctgactattctgtttaccaaggcctcttgaggaggtagtagcttaccagctgtttattatgtatgtatttacttatatttacttacctatttattttgagacggagtttctctcttgttgcccaggctggagtgcaatggtgtgatctcggctcaccgcaacctttgcctcccaggttcaagcgattctctcacctcagcctcccaagtagctgggattacaggctgcgccactgtgcccagctaattttgtatttttagtagagacagggtttctccatgttggccaggctggtctcgaactcctgacctcaggtgatccgcccacctcgacctcccaaagtgctgggattacaggtgtgagccacgaagcccggcctatttatttatttttttgagacatggtctcagtctgtcgcccgggctggagtgcagtggcatgatcttggctcactgcaacctccgcctcccgggttcaagtgattctcctgcctcagcctcctgagtagttgggattacaggtgcccaccactacacccggctaatttttgtatttttagtagaggcgaggtttcaccaggttggccaggctggtctggaactcctgacctcaaatgatccacccaccttggcctcccaaagtgctgggattataagcatatgccacagtgcccaccctttattatttatttatttagattttttgagacagggtctcactctgtcacccaagctggagtgcagtggcatgattacggctcactgcagcttcaaccactcaggctcaatcgatcctcctaccttggcctcctgaataactgggactacaggtgtgcaccaccatgcccagctaatttttagattttttgtagagacaggggtcttgctatgttgcccaggctggtcttgaactcctggcctcaagcaatcctcccaccttggtcttccaaagtgctgggattacattcatgaatcactgtacctggcctaattgctctaacggggaaagtttcatcagctgtcagattgttagatctggactgacttgggttccgaagctcagttctatcttttatttttcctttggaaaccaaattctgtaggtagcagaggtttactcaaggccacggagatagttagcagccagtgctgggtggggccgactgtcccaggctagctggatggaggccaggagggcccgggcagcaagggtggaaggggcctgggtgggtgccggaggaagtcactaacgaatgttcttcaggcagaaagttcccagggtcccattgatacccctgcctgttcacatcctggcggcaggactgggatgaggcattttttaaaaagttggggagatatcagggctggtgtgccaaagttcaggctttgtccacccaaggtgagaggctgcaggggtgtgccgtgggcagagaggggatgaggtaggggtgggagggatgagctgcccagatgcacccgtggaggagttgatctggaatcctagccactgggtttaccctgcagtgtgtcccagcagcatcccaggcttctctccagcctttggcagggctttagcttccagcagctcaggtggaccccagcatatggactttgaaggcaggcagcccaggttcaaatcctggcttggccacttcccagttgggtgccttcaggcaagtgacttaccctctctgtgccttttttacttttctgtaaaatgaagttaataaaagtgtctcctacatagggcttttaaggtggcagaattggcacatgtcacacttcaaatagcagctcggcaagtgtcaagtaagggctggctgtttccaacatcttaaccggatagacacagacatagagagggatccatctgtcagcagtttgctgaaatgggaccatactatgcacgctttgctgcaccgtgggtttctcacgctgtcatcgcttgtccatgtcgtcctcagtcagctgggattttctggtgatgatcacgctctgattctctagatgcctggaaacgctccacggtgcggatgtaccacggctcgttctgccgttctcacgagggaggcatccagcttgtaaaataaagcagcccagtgtgttcttccaccaccacatcacccaaggttctattttcaaagattttattttgtaaaaacgggaagaaaagtacaagttgctgcatgtgcatcctctctctctcgttgctgagccttttgggtgcatcctaaggacaaggacgtccttctccatggccgtggaccacggccccactcaagaaggccacgaggatccacacctttaatctgacagtctgtgttcagattcccttacggccccaataacactttttgtcatagttgttcattaaaaaattttgaattggccgggcgtggtggctcacgcttgtaatcccagcactgtgggaggccgaggcgggtggatcacaaggtcaagagattgagaccatcctgggcagcatggtgaaaccctgtctctactaaaagtaaaaaaattagccaggcatggtggcgcacacctgtagtcccagctactcgggaggctgaggcaggagaatcgcttgaacccaggaggcggaggttgcagtgagccgagatcgtgccactgcactccagcctgggcgacagagtgagtctccgtctcagaaaaagaaaatttttttttgaatccaaggttgcatgctgtgtctggttgcctcatgtgtttttcctctttaatccagacctgttctccagcccttttctctttgctgggtctttcaggacactggcatctgtaaaggggccaggcgggtgcttttggcaggatggcccttgatttggatttgtctgattgctttctcaggagtgcacgtggtcttcccacagactcccacacaaaagcctcattgtgtgaatcagattggagcagagtgtttctgatgagccggggttgggtgcctggatcctcccccagctcccagcctggcagtcacagtgcaagtctgaacctcttgggttgaagaagcctgcaattcctcctggtcccttcctccacctgctttctaaaatttctggctctcattccttgcctttgagcggtgatgtgtccatccttcagcggccctcggccagcctctgcccaccccagtgccatcacatgggaagagatggcggatctgatccctgactcatcccctgggccaggaagattgtggaaaccctggggtctcagggctggtcgggtggaaacgggaggctggatggagtggcaggtgggggcttttcctgttttgcctctccctaactgggcctcccggcagccactagcccagatgcccaggcctcagagccttgtggaaattcttgtgccagatcatcttggccctgtctggcctcctggcaggcaggtggaggtcaaactggccttacttggccgagagcccattgcagccaggatcccttggcagctctgggaacagccaagtctcccctgtccttgggatttccttccactgtctgttcccaggctcctggactccacctgctgcaacccctcgctttgcactttccacccagagtcttggatttctgttttttgtgaaatttgctcactttgaggaaagtgtaagacatatgcaatcaaatatgtaactaagatgaacatgcatgcaatcaccccacgtgaagaagagggaaagctcatctgccccgaagcccctgcagaagacactgtgtttggtcccagcttgctttgctttttatagtatcactccctcatagccatccctaaacaccgggattagtttggtccggttttggacttaacttggatgcaggcatactctcagtatttttgtttggtttggtcttgctggtgttacttcatatggtatttgtgggatccacccacattgctgcgataagctgcactctattttcatggccatgtcatatcacagttcatgatgctaatcggaagaagctgagtatcacagttcatctgtcttttttttttttttttttttttttttttgagatggagtcttgctgtgtggccaggctagagtgcagtggcgcgatctcagctcactgcaacttctgccccccgggttcaagcaattctcctgcctcagcctcccaagtgcaccaccatgcccagctaatttttgtatttttagtagagatggggtttcactatgttggccaggatggtctcgacctcttgacctcatgatccgcctgcctcggcctcccaaagtgctgagattacaggcgtgagccaccacgcccggccagttcatctgttttaaccctgatgccggtgactgtgttcacttctgggttatgacacactcgtgtccctgcctgcaagggacatgtgcctgaatccctctagggcccgacagtcagagtagggggtctggtcatggcgtgcgtgtcttcacctgcatggagaagggccaagctcttgtccaaagtggttgcagcgtttccaatcctatcatttgtttttcatttaataatttattgagttcaaattcacataacatataattaatccttgtaaatcgaataattcagtgataccaccacttctacctagtttcaaaacatttccatccctcccaagtagaattgcccattctccactctttgcagctccccagcccctggcaatcactcattttctttctgtctctacagatgcacctgttacggacatttctttctttctttctttctttttttttgagacagagtcttgctctgtcgcccaggctggagtgcagtggtgcaatcttggctcactgcaacctccgcctcccgggttcaagcgattcttctgcctcagcctcccgagtagctgggactacaggcgcctgtcaccacacccggctaattttttttttttgtatttttagtagagacgggtttcaccatgttggccaggctagtctcaaactcctgacctcaggtcatccacctgccttggtcccaaagtgttgggattacaggcctgagccaccgtgcccggccctggacatttcttttttttttgaggcagagtcttgctgtgtcacccaggctggaatgcagtggcgtgatctcggctcactgcaacctccgcctcctgggttcaagcgattctcctgcctcagcctccccagtagctgggactacaggcgcccgccaccacgcccggctaatttttttttttttttttttttgtatttttaatatagacggggtttcacatgttggccaggctggtctcaaactcctgacctcaggtcaaacacctgcctcggtcccaaagtgttgggattacaggcctgagccaccgtgcccggccctgcacatttcttataaatgaaatcatgcaatgtgtggccttaagtgcctggctgcttccgcttagcgtcatgttttggggttcatccgtggtgtggcatgtggagtgctgctttcctttttgtagctgagcaggcctccacggtgcgggtgcactgcatgctgtttttccgcgcctctgtggatgggcgtctgggctggtggctgccgggagcggtgctgctgggagcgcgcatgttcgggaactcgcttggcttctgctttcagtggtctccttttatgccctccttcccctcacccctctcgctcttcagcccgccctgcccctgcgcccatcctctgtgtggctgcgtctgtaaacctgagtgtgtccttggaccttgtgcagtcctagattccggagcctgcaggtgtgggtccagatcccggccctgcctcctgctgctgtgtgaccatggacaggctcttcgagtctctggtctctggtgggtgtctgagtctgcatgggaggcagaggttgcagtgagccgagatcgtgccactgcactccagtctgggcaacagagcaggactctgtctcaaaaaaaaaaaagaaagaaagaaagaaagaaaaaaatgtccataacaggtgcatgggccaaagaccatgtattcccgtacagttctggagaccggaagtctgagatcaggatgttggcagggctggcttctccggagacccctctcccggcctcatagacgccaccttctccctgtgtgcgcacatccccggtgactctctgcgggtcctaatctcctcttttaagggcgtcagtcagattggattagggctcaccccactgacctcatttaaacgtaatcaccgatttaaaggccctgccccccgcgccaatacagtcacattctgatgcaccgagggttagggctgcaacatgggaattttggggggacactgttcagctcataatagtagggtgcctataaaatgggctaaaaccatgccttcctataggattcagtgaggaccgagggagctagaggtggaagtgctttgagctgggggtggcacagggaggcccccttcatgtggcctgtcacgtctgaggagagggcggcttttccatgccatgcacggtaactcgtgtcaacattcctcgtgctgccctgtttaaaatctatccgtgttcctatgtgtgtatcaggcttattgcttccttctgctgcctggaccccctaattcatgttcatcctgttgtatttattcccttagcgacgggggtaccttggttatgtctgactcctgcctccacaaacagcaaatatgctggaccctgctgccttgtacttctccacaatttcctggggatgcgcaggagtggaattgctgtagggcagagggggagccattttcacccaacatgccttccagaagggccactgctgttcaccctcccagctctcacatcctctccagcacctgagacgatttagtcttcgagaatgtctggggtctcagtgagggtacgtggtgcagcattgttctcatgtgcttttctgaggtgtgaatttgagtcttcttcctttcataagtcctcaggtgggggtctgaggctcagagattttgagggccatgttggagggtcacagagcaaactggggctagaccccaccagcttgggcttggagggcctccagcttggatgtagggcccttcataaatccaggatgatctcatcttgggatccttaacttggtaacatctgtagagaccctatttttaaataaggccacattctgaggttctaggtgggcatgaatttggcaggggacatgcttcagaccagcactatgtgtgcaggtgcccaatcctcagatctgcagagctctgggttcaaatccaggtcccattacttgggtcctgtggaaactcacttttttcctaaaagccgatttccacctctgcacatggggccaatgttcttccatctcacaaaccagaagtcaaggccaggcgcagtggctcatgcctgtaatcccagcacttagcgaggcagaggtgggaggatcgcctgaggccaggagttcaagaccagcctgggtaacatagtaagaccccccccccccatctccacagaaagtaagaaacaaaaacaaaacaaactggaggccaaggagagcagctgcggatggtcacgtgcctctccctgggtgtgcccagctcttacccagaaagccctggctggcattaaaaataaggaaggtaaaatagggatatgatcaaacaaattaaaagtgtacggaaaaagagtcagccttctggaaagatcacagcacgacactgctcccctggccccagctggtctttgctccagaggtgacttgggttaatagttccttgtttttccttcctgcaataaacatgtttgcgtccacagagggggacccacacccgtatccttcccgtccgtggcacacgtcccacaagggcacacggttcccatgcttttctgcctcttggctggggcacctaggtggatcttggcatctcttgttcccgcacagaacccatcctcatccgagccctgggcctctgtctcccagcaggctttgcaaataggaccttgtaaaggacagggctgtgtttcccaaaggccagagcagtgaagaggggcatgtggggtcgtggggcacacctctaggacattggggtccaggggtcctttccagtaagaccttgctgtgctggaaacacccctgtgtctttcagggcttttttcagagtcagggttgatgtgaccgccacgtttcctctgggcctgacagctgtaatctgtggcttgggagtgcagataagtgtgatgaagctgccagcaggcctgggcatctgtgtccttggtgggggcagggagaagagacagggactgggatgctggggccagggccagagccccgctgagatatgaggtccccttccaccctgggaggtgtgtggggaggagcttcctcgaacccctttagctgggacggatggaagaatgagcagctttgcatttccggcagcgtctccagctttcctggggctttctcggcttgtgttattgatgaactccagtgcgtgaggccattggagccttagaggcctgtttcccctggacaggtgactgcctgggccagaggcagcactggcatggtgccctcttgctcctggctgggagtgacacggggcgtggggcgctttgcattcatccccagctgtttgggcacatttacaaccctcattttacagatgggacaaaccccagtggagaatctgctccgggcagctgtttatgaaccacctgaatggggcacacaggactgtgggaggaggaggagggacccccagggctgaagtggcagggaaagctactcatcctttcggcccatgtttactgctcacaaattgtgggccaggtctcgtgccaagtgttggagctacagccgtggacaaaagagacctggtcctgctcacggcagctacgctttagcaggagggatgggccatggagaagcacatggaagaggtggggtggcgagaagagctaggaaggggacgaggcaggtgagctgacatggagccactgctgggaaggggactccttctgatgtgggagtcaggagggcctctcagaggaggggctctatgagctggggagcagctggcaaagagcacagcaggttcaaaggccggaggtgcgaaggagcctgctgtgttggaggaagagggagcaggccagtggggttgggagaagtgactggagggggtgaaaggggacaggcatgtgggggccttgcaggacacctggaggagttcagatttggttttcaattccatggagggttctgagcagggaagagccatgatctgactcagtattttttttttttttttttgagacagagtctttctctgtcgcccaggctggagtgcagtggcatggtatcagctcactgcaacctccgcctcccgagttcaagcaattctctttttttttttttttttgagacggagtcttgctctgttgcccaggcgggggagtgcagtggcgcaatctccgctcactgcaagctccgcctccctggttcatgccattctcctgcctcagcctcccgcgtagctgggactacaggcgcccgccaccacgcccggctaatttttttgtatttttagtagatacggggtttcaccgtgttagccagcatggtctcaatctcctgacctcgtgatccgcccacctcggcctcccaaagtgctgggattacaggcgtgagccaccgcgcccagcctcaagcaattttcttgcctcagccttctgagtagctgggattacacgtgcgtgccactacactcggctaatttttgtatttttcgtaaagatggtgtttcaccatgttgggcaggctggtcttgaacccctgacctcaggtgatccacctgccttggcctcccaaagggctgggattacaggtgtgagccaccacgcccagcctgactcagtcttgaagagctctctggctgctgtctggagaagggagtgtcgggggccaggctggaagcggggaggcagagaagatggtgatttgagccaggtgggggtagttttctaaatggaaagaagggaacatattcgagttttttttcagggagagtcaacaagataggtcagtggactggggtgcgagggaaggagaggaatcaagggtggttcctcaaggtttgaggagtttggtagatggtggagccattttccgagacgagaagatcgggggagggaggttgagagcagatggagtgtgggccttaactctggtcctaaaatcaagcgaggacaactcaacaacaagagtcagacaaccccattaaaacacggaccaagcacctgcaaagaagacatgcaggcagccaggcgcggtggctcacgcctgtaatcccagcactttgggaggccaaggtgggcggatcacaaggtcaggagttcgaggccagcctggccaagatggcgaaaccccgtctctactaaaaatacaaaaattagccgggtgtggtggcaggcgcctgtatgtaatcccagctactcaggaggctgaggcaggagaatcgtttgaacctgggaggtagaggttgcagtgagccaagactgtactccagcctgggcaacagagcaagactcctgtcttaaaaaaaaaaaaaatgcagatagccaacggggacatggaagtgtgctcagcgacactcgctcatcgttagggaaatgagaatcagtgagacacactcatacccattaggatggtcacttgagaaaacagaaaatctcaaatattggtgaggatgcggagaaatcggggcccatgtatgccgttggggtgaggatgcggagaaatcggggcccatgtgtgccgttggggtgagtgtgcggagaaatcggggcccatgtgtgccgttggggtgaggatgcggagaaatcggggcccatgtgtgccgttggggtgaggatgcggagaaatcggggcccatgtgtgccgttggggtgagggtgcggagaaatcggggcccatgtgtgccgttggggtgagggtgcggagaaatcggggcccatgtgtgccgttggggtgagggtgcggagaaatcggggcccatgtgtgccgttggggtgagggtgcggagaaatcggggcccatgtgtgccgttggggtgagggtgcggagaaatcggggcccatgtgtgctgttgggaatgtaggatggtgcagctgctgtgtggaggcccccccaaaatttaacatagaattaccatatggtggggcaaccccacttctgggtatcaaagaaatggaagtgggaacttgaagaggaatctggccaccgcgttcattgcagcgctgttcacgatggcccaacggtgggagcaacccgagtgtccgctgatgggtggtgggtaagaagctggggcccatccacacgttggaataggattcagcctggaaaaggaaggacgtttggacgcacgctgcgacatgcacgggccttgaggaagttatgcgagtgaaataagccacaacaggacaaataccgtacgattccatttgcatgagctccctagagtagccagatccacagagacagaaaagagaatggtgggtgccaggggctgggggagagggggtgcagagctctttttcagtgggtacagggtttcacttttgcaagatgaaagagttctttagatggatgttgctgataattgcacaacattgcaaatgtccttaatgccactgaactgtacacttaaaaatggctaagttgggctgggcgtgtagtggctcatgcctgtaatcccagtacttttggagcccaaggtgggtggatcacgaggtcaggagttcaagaccagcctggccaagatggtgaaaccccgtctctactaaaaatacaaaaattagcctggcatggtggcaggcgcctgtaatcccagctacttaggaggctgaggcagagaatttcttgaacctgggaggcagaggttgcagtgagctgagatcacaccactgcactccagcctgggtgacagaccgagactccatctcaaaaaaaaaaaaaaaaaaaaggctaagttggtaaattttatgtttaccccaattaaaattaaaaactgtggcagggtttaacctgaagggagaaatggtactggcccctcctgcttgaatgggttgggctgttggtttgtagatggtagaccagacggcccagcctgttggccagggtcaaattccaacatgctgagcctgttgcagaagacttagcctttgaagcaggcagccctgagcttctgattcctccaggcccaaaccaccgttgccctattttacaagaccttggctggcttcatgacgtgttcttgaactggagccagtggtgagctcagggaggctcgtgtaacaatagttccctgaggcatgtttatagccgggtgccctcttcacaacagacacatgtcctgggtcatctcattctctctgcactgccacggggaggatggggaggcagtcacgtctccatgtggcatatcaggggaccggggtgggaggggctgactgagccgaggccagaactaggtctgcgccctggccctctccctaatggccagatccggcctcacccgtgaagctggcctggcaggggatggcccttcctgaatttctgtgtggtctaggctggggttggcatgcttttctgtacagagacagatagtcaatatgctcagctctgcaggctgcacgggttgtgtctcagctactcagccctgctgctgtgatgctgaggctgccattgacgacacagaaataagtcgaggtggccgctgtgggccagtgccactgcatttatgaacaccaaaatgtgaatttcatataactttcacatgtcatgaaatggcatttttctttcaattgtttgtttatttatttttaacatattttttggagacagggtctcactgtgtcacccaggctggggggcaggggcaccatcatggctcactgcagcctagacctcctgggctcgttatcctcccaccttactctcctgagtagctgggacaacaggcatgtgccaccacgcctggctcatttttttttttataggttggtgggtgggtgtgtagggggggtcctcactatgttgcccaggctcgtcttgaactcctggcctcaaagtgaccctccccaccttggtctcccaaagtgttgggattacaggcgtgcagcactgcacccagctggctgactttctttcttttcttttcttttcttttcttttcttttcttttcttttcttttcttttctttctttttctttcctttcttttctttcttctcccttccttccttccttccttccttcctttctttctttccttctttctttcttttctttcttccctttcttcccctctttcccttctttccatttgaaaatgcaaaatgattgttagcttgtggggtgagtagaaataggcatcaggctggatttggtccacaggctgtagcttgttgaaacctttctaagaacagagaagaataatgtttttgcttgaaaacagccagctttattgaggttggggtgtttgaaagaaggcatattcactgtctgacttgtgtggaaacagtggggctgggatcagccctggtagaaattgtttttgtccaaaaaagcaagtagaggtgggctgcctggagttcccgtcatgcaggtgcaactggggagcaggatgaggccctgatttggcggggaaggagagattgtgcttgattcatctctgtgcccggggaccaggactgtatgcaccttccagcattctcttcgctggtctgagctccttacttgccacgcctgtgctgggcctttaccaaggcagtgcccagcctttggtcagacccaaggtcaagactctgtgccaacattgggtttgtgctcttgggcaagcgagtggtttaatctccctgtacttcactttcttcatcagtaaaatggagacgaattattagctttattctattttattttatttcattttattttgagacagggtcttgctctgtcacccaggctggagtacagtggcacgatcatggctcactgcagcctctatctcctgggctcaagggatcctcctgcctcagccttccacgtacctgggtctacaggcatacactaccacatttggcaaatttttaaacattttttgtagagatggggctcactgtgttgcgcaggctggtctcgaactcctgggctccagtgatcctcctgccccagcctcccaaagtgctgggattacaggtgtgagccaccacacccagcctaattgttaggtttaaataaatgaaagcattgctttaaatgggatgctttgagctggaaacaacataaaacttgcctccagtggcttctgtaatgcagatgtttactgttgtgcttcctgagagatgggaggtggtggtttccagatgcgttcagcagttcagaacatcgtgctctgcctcagtagattttgcccagtggctctccgaggtggctgtactgatggacattctggccagtgacacatgcgcgagacctctggtgcttgccagtgcgtgccagtgaatacgtgtgatgtccctgagctcttcctactgggtacctgagtcacttgtgaattgcgtgtcctcttccccacttcctgctcagtccacgagggcaggaatcctgttggattaactttacccctgtagcactgatcgcccgctttggatgctcaggcagggttgaaatgaatgaatgactgagtgaatgaatgaatgaatgaatgccacgttctcatcgtgtgttactataggacagggattgcaaactgtgcaggaacatacatgggggaagggccctggcatgaggtgatagggagtggtggggcccgttgcaagctggagggcacaccccaactgtgaagcggctcctgctttgctccagcgggctgggccacgtggcgtgcaggcccagagctggacatcacccaggttcccaaaagaagccagaaggcaggaatttacctgctggtttaagatactgtcaacagattcaaatattttgaaatatgtgattcaaaacccatctactggccaaatctggcccatgggcccagtttgtggcatctgtttcaggaagagacaagacctagtttgtgttttttttagtgggggcggggaggatgcggtgtataagaaattttgagtgaattaaaaaaaatttatgaaaaatttcaagggctgggtgcagtgtctcacgttcgtaatccagctctttgggaggttgaagcgggagaattggtttaggccaggagtttcagaccagcctgggcaacatagcgagacccctacaaaaaataaaatctacaaaaaatgaaaaaattagctgagtatggtgacagaagctgctgtggtcccagctaccaaggaggctgaggcaggaagatggtttgagcccaggagttcaaggctacagtgagctcggactgcaccagtgcactccagccagggtgacagaacaagaccctgtctcttaaaaaaaaaaaaaattcaaacatacataaaaatagaccggtgcgatggtcatgggccctgtaacttgctgaggagataccaagtcttgccttctgcacgtgcctccatacactttccccttttccacattgttctggggctcatgtcagacattgcctcatccgtcagtgtctctagtatagccacggcacttcatggtgcattggagtctggacgctggagggctnnnnnnnnnnnnnnnnnnnnnnnnnnnnnnnnnnnnnnnnnnnnnnnnnnnnnnnnnnnnnnnnnnnnnnnnnnnnnnnnnnnnnnnnnnnnnnnnnnnnnnnnnnnnnnnnnnnnnnnnnnnnnnnnnnnnnnnnnnnnnnnnnnnnnnnnnnnnnnnnnnnnnnnnnnnnnnnnnnnnnnnnnnnnnnnnnnnnnnnnnnnnnnnnnnnnnnnnnnnnnnnnnnnnnnnnnnnnnnnnnnnnnnnnnnnnnnnnnnnnnnnnnnnnnnnnnnnnnnnnnnnnnnnnnnnnnnnnnnnnnnnnnnnnnnnnnnnnnnnnnnnnnnnnnnnnnnnnnnnnnnnnnnnnnnnnnnnnnnnnnnnnnnnnnnnnnnnnnnnnnnnnnnnnnnnnnnnnnnnnnnnnnnnnnnnnnnnnnnnnnnnnnnnnnnnnnnnnnnnnnnnnnnnnnnnnnnnnnnnnnnnnnnnnnnnnnnnnnnnnnnnnnnnnnnnnnnnnnnnnnnnnnnnnnnnnnnnnnnnnnnnnnnnnnnnnnnnnnnnnnnnnnnnnnnnnnnnnnnnnnnnnnnnnnnnnnnnnnnnnnnnnnnnnnnnnnnnnnnnnnnnnnnnnnnnnnnnnnnnnnnnnnnnnnnnnnnnnnnnnnnnnnnnnnnnnnnnnnnnnnnnnnnnnnnnnnnnnnnnnnnnnnnnnnnnnnnnnnnnnnnnnnnnnnnnnnnnnnnnnnnnnnnnnnnnnnnnnnnnnnnnnnnnnnnnnnnnnnnnnnnnnnnnnnnnnnnnnnnnnnnnnnnnnnnnnnnnnnnnnnnnnnnnnnnnnnnnnnnnnnnnnnnnnnnnnnnnnnnnnnnnnnnnnnnnnnnnnnnnnnnnnnnnnnnnnnnnnnnnnnnnnnnnnnnnnnnnnnnnnnnnnnnnnnnnnnnnnnnnnnnnnnnnnnnnnnnnnnnnnnnnnnnnnnnnnnnnnnnnnnnnnnnnnnnnnnnnnnnnnnnnnnnnnnnnnnnnnnnnnnnnnnnnnnnnnnnnnnnnnnnnnnnnnnnnnnnnnnnnnnnnnnnnnnnnnnnnnnnnnnnnnnnnnnnnnnnnnnnnnnnnnnnnnnnnnnnnnnnnnnnnnnnnnnnnnnnnnnnnnnnnnnnnnnnnnnnnnnnnnnnnnnnnnnnnnnnnnnnnnnnnnnnnnnnnnnnnnnnnnnnnnnnnnnnnnnnnnnnnnnnnnnnnnnnnnnnnnnnnnnnnnnnnnnnnnnnnnnnnnnnnnnnnnnnnnnnnnnnnnnnnnnnnnnnnnnnnnnnnnnnnnnnnnnnnnnnnnnnnnnnnnnnnnnnnnnnnnnnnnnnnnnnnnnnnnnnnnnnnnnnnnnnnnnnnnnnnnnnnnnnnnnnnnnnnnnnnnnnnnnnnnnnnnnnnnnnnnnnnnnnnnnnnnnnnnnnnnnnnnnnnnnnnnnnnnnnnnnnnnnnnnnnnnnnnnnnnnnnnnnnnnnnnnnnnnnnnnnnnnnnnnnnnnnnnnnnnnnnnnnnnnnnnnnnnnnnnnnnnnnnnnnnnnnnnnnnnnnnnnnnnnnnnnnnnnnnnnnnnnnnnnnnnnnnnnnnnnnnnnnnnccaggcatgatggctcacacctgtaatcccagcactttgggaggccaaggtgggagatttttgagcccaggagttgaagaccagcttgggcaacatagtgagaccccatctctataaaaaatttaaaaattagccaggcgtggtggtgtgtgcttgtggtcccagttatgtgggaggctgaggaaggaggattgcttcagcccgggagttcgaggctgcagtaagccgtgatcacaccactgcattccagcctggcaacagagtgagaccctgtctcaaaaaaaaaaaaaaagttaaggatcttgagatgggagatgaacttggattgtcccaggggccacaatgctttcacaaggatctttgacagagggaggcaggagggtcagagtaggagatgtgacctcagaagcaggggttggagtgataaggggacaggagccaaggaatgcagaggcctcttagaagctgggaaacggaaggcaatggattccccctgagctccagaaggaagcaccctgcctgcaccgtgactttcatcccatctcaggggcagtcccagtttggacttctccccccgagaactgtaagatgataactttgtattgatctgagccagtgttaattgttaattcttacagcagcagtgggaagctaatacaatgaaaatgcttccattaaagccaggtcattaacatgatagtataatctggtttgggtgggcttaaataaaatatttaaacttaaaataatgttgtgttaatatgtgaacttttgaaattgtcagtgtttttacaaaaagactttaatgttctggaaaaagtataaatatggggtgcacattttttccttttgcttgaagctgtaatatgattcggtgaggcactgatttggccctccctgtattgccgcgacagagcctgcttgttttaaaataactttctgttttagaacagttttttttttttttgagaccaagtctcactctgtcgcccaggctggagtgcagtggcacaatctcggctcactagaacctctgccttccaggttcaagtgattctccttcctcagcctcccaagtagctgggaccacaggtgcctgacaccacacctggctaatttttgtacttttagtagagtcgggatttcactatgttggccaggctagtctccaactcctgacctcaagtgatccacctgccttggcctcccaaagtgctaggattccacaggtgtgagccaccgcgcccggcctagaacagttcgactttcagaaaaattgggaagatagtgctgagttcccacatatcccacagccagtgtcccctgctattaacatcttaaaggaatgggatacatttgttgctatgaatgacccagtgttgatacatcagtaataactaacatccagacaggattcacgtttccttcgtttctccttcgtatcattttctgtcccaggacccaatccagggccccacattgcgtttgtccctcacgttgccttaggatcctctggtctctgtgggttctcagactttcctggctttggatgacctggattgcgttcctgagcaccggctaggaattttgcaggacgcccctctgctgggatttgtctgttgttcttctattgattaggccctagttccgggttttggaaggaagatcgcagtgacgaagggctgttcccagcacattatgtcaacatgacctgtccctgctgcatgggtcctattctttattccttgttacaggtaaagaaacaggcacaggaagttgtatcaggcgcctgctggtaggtggaggatgggcagggggttgaggggacagggagtggacagagcccctttgctggtaaagaggggaccccagacctctcacgtctctccagggcccctggtggtctcctggctggcctcgctgctctgcttcagaaatcagatttgacggggcactgggaccctgattgggccttggtggctgtaggtgctctcttattagcgacaccacttgagggtgtattgaacatctgaagagtacccacccctggatcaataattttttgctttaggccaggcgcagtggctcacgtctgtaatcccagcactttgggaggccaaggtgggccgatcacctgaggtcaggagttggagacctcagcctggccgacatggtaaaaccccatttctgtcaaaaatacaaaaatcagtccaggcgcggtggctcatgcctgtaatcctagcactttgggaggccgaggcaggcagatcacctgaggtcaggagtttgagaccagcctggccaatttggcaaaaccccgtctctacttaaaaaaatacaaaaattagccaggtgtggtggcgggcatctgtaatcccagctacttggggggctgaggcaggagaattgcttgaacccgggaggcagaggttgcagtgagctgagatcacgccactgcactccagcctgggtgacagagcaaaactccgtctaaaaaaaaaaaaaaaaatcagctgggcatggtggcatatgcctgtagtcccagctattctggaggctgaggcaggagaattgcttgaacctgggaggtggaggttgcagtgagctgagatcacaccactgcactccagcctgggcgacagagtgagactctgtctgaaaaaagaaaaaattttttttgctttaatttttttctttttaaaaattgaagtatcaaatgcattaagaaaagtgcacaatttcggttagaggttgatggattttcacctaggtatgcacgcttgtaatgaccccctataccaagtgtaaacgcctcccccgcacccctccctgtcagtatccacccctgaggtcctgctgcccccacctctatccccatggattggttttgccattccccgggacgtcacttatatggactcatgcacgtggtccctgtgtgtgatttaccctgtcattgtgtgtctcaattggtcattcccttttgtctctgggtagcattccatggtatgagtgtgtccccatttgtcatgcattcacttgcttgtagacatttgtgttgtttccagttttgggctgttatgggtacggctgctatgagcatttgtggataatctttgtgtgggtgcatgctttcatttttctgggacaaatactgggggtgggattgctatattgtagggtgaacgtccagctttggtagaaaaagtatattccacagtgactgcactaatgcacttccaccagcaatgtgtgagcactctggctgctccacatcctcaccagcacttgttattgtcagtctttttcattgtagccattctggtgtatggcatgggatctcactgtgagtccagtggacatttctctgatgactaagccacccagggctggtgggtggctccaggaagtcacaggaatcctttctcctatctcctattctgctccgcccttcttcatgtgtggctttcattcttaagggtgcctcatgatccaagatggctgctctagctccatccattgtgactgaattccgggcagcaggaagggggacttatcaacaactacatagaaatttcagatattgataatgtcagggagataaaacagggtgatgaatataatgtgatgggggaagggctgctttaggaagaatggtattttcatccattttgttcactattgaagtgcccaggcctagagcagagcctgccatacagtggggctcaatagagatggttaagggattgaaaattgctcagggaaggtctcacggagaaagtgactttagacttgagaagtgaggggctcacttttgtgggcatcaggggaaagattgcccctggaggagcaaagagtcagtgcaaaggccctgtggcagaaacttgcctggtggctcaggagcacagcaaggccagtgtggctggagcagagtgagcgaggcagataggaatgggggaggagactggagtgactatagggagctgggttgtgcaagacctcataggtcactgtcaggaatttagattctattctgagataaatagggaggcatgggggaggtttgagcagaatgacatgctctgactttaatcttaaaaggataacttggattctgtggggagaacggggcggggggcaagagcagaggcaggaaaacagcagggaaactacggcacccatccatacaagccaggatgggggccaggatggtgttggagagaagtggatggatttgaggcatgctttaaagcgagagcagcccagccttgctgatggagggtgctaggtgggaggaaaatggaggactcaggaatgactcaacctcttcgcttaagcaacttacaagcgtgggtttcttgtaaaaaccttttattttagtcttcttaccttagtcctttaaaaatcaaaagaagttggaacatgagccaagggtgtggtgttcccaagtcccagattggattagcctgtgtcgtagttgttcctgcatcttaaggccccatggagctggggatgcctggagccctgggattgagagtgtagtcagccactgactgctggtccagagtgggcagggcctggccttgtcccagaactaggcttcgtctgagcaaattggcttcttggctcatttggtcagaggtgtgtttcttggaagcctgttttctcttctcataggaggaggaattagaccttgcaattcagtggccaggtcaagttaatgattcatttgtgaagctcccgtgcaaggagcccagcggggatggcctaggagagaagcgtgagggcacaggcctagacgtggatacggagcctggggctctgtctctccctgctcctgtgaccttggtcaggcatttggctttggagcctcagtgtctgcttcgatgagatgagccattgagaatttaagaggtgaagtaggtggaagtgtttcgctacctgaacagggccgggcagattgtccagacgattccgctcccctggtgtctgagggcaggggcgtctcagggcaggggccccatcgtgttcatccctgtgtctttaaattcctagcatagcatctagcatggggcggatgattgtacagggcatgaactgcaatcccaatgaggtcagagcagcctcactgtaggccgaggtcgttccagtgggcttcatggaggaggtggcacctgggcgagcggggtgttaggtttggaggtcaggggcctctccaggtgcaggggagagtgctgtgggtggtaggaagagaatgctaaaaattaatgtctatgaaatcttcatctcatccatcacacatttaccgagttgttgccccggcctaaacaggcggtactctctgtgtatttaaaaaaaaaaaaatcccttcttaagtatgagctgtttaaaacacacaaaggaggactagcgttaccacccgctagacatttccacgttgattatatggtttcaggtctcacttttgctcattcacccagaaaatatttacagagctcctgcaaggtgccaagagctgtcccaggccctgaggacagacacatcgccaaacaaagcagctgaggatcttgcccttgtgggtttatggccaggcaggtgatacagatggacagcaataaacctgataagctaattataccgtgtgctcgaaggccacaagcagcatggaaacaacacggcaggtcgggaggtcaggagttttaggggcaggttggatgagccttctgagaagggggcatgtaagcagagattcgaaggggtgagggatttgaccacgtgtttaggaggaagcagtgggtgcaaaggccctggggcaggagcgtggcctcttagacaggatagcaaggaggctgtggggctgggctgagtaacagacagtggttgtggaatgagaccaccgcttctgctgttgtccttcccagcttctccccagcctccccttttccctagtttataagacagcagaaaagggagaaagcaaaaagatggaaagaaacagaagtaagataaatagctagacgaccttggcgccaccacctggccctggtggttaaaataataataataataataatattaacccctgaccaaaactactggtgttatctgtaaattccagacgttgtatgagaaagcactgtaaaactttttgttctgttagctgatgtatgtagcccccagtcacgttcctcacacttactcgatctattatgaccctttcacatggaccccttagagttgtaagcccttaaaagggctaggaatttctttttcggggagctcggctcttaagacgcgagtctgccgatgctcccggccgaataaaaacctcttccttctttaatccggtgtctgaggagttttgtctgtgacttgtcctgctacagttggatgtggggccagagagaacacaggggccagaccaggcagaggggcttgtaggccaatgttcggacggtggctcgtatgttattttcaagaaataacatgttcacaatgacagttaaagctttccccacatccccagcccccagccctctcctgagattgtttgcaggtatcatttccctgaatgtttttctacatttccacatgggtttgtcttcagaaagaatatagagtattatttcatgtgtttggaaaattcacatcaagaggcccatgtcaattgtttctttctttagccttttcttcactcaagatttttttttctttaaaaataaaaattgaggccaggtgcagtggctgacacctataatcccagcactttgggaggctgaagcgagtggatctcttgagctcaggagttcaagaccagcctgggcaacatagtgagaccttgtctctactaaaagcaaaaaaataaaaaaataaaaaaatagccgggcgtggtggtatgtgccttgtagtcccagctactcaggaggctgaggtgagaggattgcttgatctggggagatcgggaagtcaaggctttccagcctgggcaactgagcgagactctgtttcaaaataaataaataataaaaattatgtatatttaaggcatccaaatgctgttttgctatatacacacacatagtgaaatgattactacagttaagcagattaacatatgtatctcctcatatagtcacctctttttttttttttttttttgagacagggtctcgctctgtcacccaggctagagtgcagtggggtgatcacggttcactgcagccttgaactctcaggctcaagtgatcctcccacttaagcctcctgagtagctgggaccataggtgcgcgccactgtgcctggctaatttttgtattttttatagagatgggctccctatgttgcccaggttgttctcaaactcctgacctcaagcgatcctcccacctcggcctcccaaagtgctgggattacaggcatgagtcccggccacctctttgtttttagtggtgagagcacctgaaatctgcttccagtatacagtacagtattaatcacagtcctcgtgttgtgcatgcaacctccagaccacccatcccacatgactgcagctttgcgccctgtgacctgcatctccccacctccccagcctccgccccgtaagcaccattcaactctctgtgtattcaatgtcttcagattcctcacctctaaaagacaaatctggaagtatttgtcctgcagtatttgtccttctgtcaagattctgcctttgagatatctgcaagtcgatggcgtttactcactgtgcagccaccgtgtgcagaagcccagcttatctttgactgagaacctggctgggctctctgttgtttttcaaggcagggtctcgctctgtcacccaggttggagtgcaatggtgtgatctcggctcactgcaacctccgcctcctgggctcaagcgattctcccacctcagcctcccgagtagctgggactacaggtgcatgtcaccgtgcttgggtaatttttgtagttttagtagagacggggttgcaccatgttggcccggctggtctggaactcctgacctcaagtgatccacccgcctcggcctcccaaagtgttgggatcacaggcgtgagcccccgtgcctggccctctgttctttttttgaggtctgacaattcttctggcgctttcttgcacacttaggagaatctttctagggcagagttttcaaactgtcagatgtgatcagattgtgggttgtgaaataagtggggtgggtggggatcagcttttttttttttttttttttttgagatggagtctcgctctgttgcccaggctggagtgcagtggcgcaattttggctcgctgcaacctccgcctcctggattcaagcgattctcctgcctcagccacccgagtagctgggactacaggcatctgccaccacgcctggctaatttttttgtattgttagtagagacagggtttcactgtgttggccaggatgatctcgatctcctgacctcatgatttgcccgccccagcctcccaaagtgctgggattacaggcatgagccactgcacctggcctgggatcagcattttaaaaacagaatggaataggatagaataccagaggggcgaataatggagtcataacgtaagttgcatcatgctgggaaggtgcgtattccctcatgaggcttctggtgggtgtgcaggtcgtggccctagcctggcaggagctgggaagctggtgctctgcaccatgtctgaacagggaacccacagaccatggggctttgctcacacctgacccgattagaaactgtcccgactccccagtggcctgacccccgctgtgcacagcggtcctgtttccaaacatctttgcctgtagttgttttcttggatgtcctaatttttgctcatctactgggaaatgatatctcattttaatttggagttaatctttctttttgaaattgtgattaagatccagttaacgtaaaattcaccaaaaccatttacaaatgtacagtttagtggcatttagtgcgttcgcaaggttgcgcaatcgttaccacgatctagttccaaagcattctcattaccgtgtacccattaagcagtcacccaccattcctttctgccccagcccctggcaaccaccaatctgctgtctctggatttgcctattctgggcatttcgtaagtgtggtcagacactaagtgtggccttttgactggcttctttcactccatgtcaggtttttgaggtttgtccatgtggtggcatgtgtcagtgttgcattcctttctttttctttctttctttctctttttttttttttttgagatgaaatctcggtctgttacccaggctggagtgcagtggcgcgatctcggctctcactgcaacctccgcctcccgggttcaagcgattctcctgcctcagcctcccgagtagctgggaatacagttggctgccaccatgcccagctaatttttgcattttttttttttttaatagaggcggggtttcaccatgttggccaggctggtcttgaactcctgacctcaggtgatccacttgcctcagcctcccaaagtgctgggattacagatgtgagccaccacacctggccgcattcctttctttaaaattattttttttggctctttaaatacatttcttttttacgcagtagtaaacagccaacccatgcattcctttttctaagtgagtcagatgccgctgtctggacagaccacactgcgttcagccattcatctgttgacggactcttgggtcgttttcgcccattgcgaacagtgctgctgtgcacattcttgtacgtgttgttttttacacccattttcagttcttcttgggtctgttctggggagtggagttgcagggtcatacggtaactttgcgtttgatcgtttgaggaacggtcagactggtttccacagtggctgttccacgttacacttctgccggcaatgcataaaggttccagttcccacacccttgccaacacttgctattttccatgaaaaaaaattctagccatcctggtgggtgagaagtggtggcccattgtgactttgatttgcatttccctgatgatgtcaagcaccttttcatgagcttgttggctatttgtgtattttctttggagaaaggtcttttcaagtcctttgcccatttgcagttaatcttttatttttaaaatttcacattatagtttcaaaagggttttagtgaagtgtagcacacgtatagaaaagcccacatataaagggaataacaccatacatttttcagtgaacatagtcccgggtaaccagcaaccagatcaggaaacagaattttcacccgcttatcccccaacctcccaggtgacccctgttctggtttctattgatatgttagtcttgcctgttttagaacgtcacataaatgggattatatgtgtatgcacatatctgccttttgatcaacatgattgcattatattttaaaggtagtaatagtattcatttttaaatttttttttacttaaaatattctggagattgttccatagcggtaaatatagcatgtcatgggtggtggtgttgctgttgtttttttcagacagggtcttgctttgtggcccagactggagtgcaggcacatgatcacggctcactgcagccttgaactcctgggctcaagtgatcctcccagctcagtctcctgagtagctgggaccacaggtgtgcgccaccatgcccggctaatattttttgtatttttagtagagacacggtttcaccatgttgcccaggctggtcttgaactcctggcttcaagaaattctcctggcttggcctcccaaagtccttggattacaggcgtgagccaccatgcctggcctaatttgatgagttgcatcagatgtatacacttcacctatatggcaaccaaaatcaagatagctgggccagttcacgttagtcccctccctccatcccggtccccggcagccactggtctggcttctctctctagagtattccctttccccgatgtcgcggaaatggtgttgtgtagtatgattcttcttttcttttttttgcttggggtagtgcttctgaggctcacctgtgttgtggtgttcatccatggttggttctttttgattgccaggtagcattccattgtgtggatatgtggcaattcatttatctgttgatggatatttgagttgtttccaactatcaaatatggatatatcattccatatttgtttttggtgaacattcaggcaagtcacgctcttaaaggcttcccagcctttgcacaggctgtgtcctctgccaggcactcctccaccatcttcttttcctagcaaagcccagcttattttaaaattcccagctcagatgtcccctcctccaggcagccttcctgggctcaaagggtctatttcgccagatgggagggagtggcgtccaacaagggctcaccttggcattctatcccaactctgtgttccagggccatggtctttgaccttgggggtggtggggacagaatcacagaatcagccatgttaggcaaaaggccacagtgtccccaccactgttatctaatcagctgcctggtctagtgtggtggaaaaaagtcatcctgctgatcaaaagcagggcaaagtccatcccttaacccgggtggaggtggggcagaggaggaagggtcacttaatgactgcagggctgaccctctggtgcccggggtcttcagaccttgttctaagcactttacctccatggactcattcaaacctcacagcagcccatgaggcgacactctccttacgcccattgtatggttgaggaaactgagactcggagaaggtcagtgacccatccctgatcacccagttggacagggctgcgctgggtctctgaagattccctttgggcagtgctgaatgaatgggctgaaacccagggcctgaaagcctcttctttggggagagagagagagagagagagattgagacatggacacgcggccggatcccatgacttcttggtttagccctgattcatcttcagaaccaggccaagcggccaggggaggaggaaagcatggtgagattccaaaggagaaaggtatctccagcccagcagcctctgctgagaaaccaggtgggagagggaggctgcaaagggaaattgaggctgcgtgtgtgtgtgtgcgcgtgtgtgtgcgtgtgtgtgtgtgtgtgtgtgtggagatggagtctcgttctgttgcccaggctggagtgcagtggtgtgatcacagattgctgcaacctctgcttcctgggctcaagtcatcctcccacctcagcctcccaagcggctgggactataggcacctgccaccatggatggctgatttttctattttttgtagagatggagtctccatgctcaggctggtcttgaactcctgtgctcaagtgatctgcctgcctcggcccctcaaagtgctgggattacaggtgtgagccaccgcactgggccttgttttgcttttttaaaaaagcagctttattaaggtgtgattgatataaaacaatggcacatatttaatatatgcagtttgatgggctggtgtgtgcacaccgggaaacccgcccctgagatccaggtgctgaacatacctgtcacctctacggttccctcctgccccccactgttttctgtggtgagaacatatagttcgtgctctactccccgaacacattttccagggttctgggttttgatgctgtgttttctatggggggagcaccagcagctggatgtgtcccccaggctggtgaaggggtctggcctgtggtgagcagggtccccagggctgcagggtctgtcccagacagagggacctgcagtgcatgggctttgaggctgggtgaaggccaggactgaaggaagggctgggcgatcggggcctgagagctgggaggggctggagctggtgcctgtgggctgtggtcgcatggggtggtgggagccgccatggggtggggagggcgttaccgagggggcaggactgctctttgatccagctcacataccacctcccccaggaagacctcccggactcctcagtgccctccaactattggttgaatctctctccagccttagttgtgcctcagtttcctaatctgtaacatgggggtaataatagtggaggtggctgcctcaaagagtaatggtgctgttcagaggatgagaacacagtgaacagcatcaccaggctcatggcgcaccccggaaatgctcgcttctgttacctcattaatattcagtttatgcgccttcgtttgcacctatgggctgctcagaccataaggtgatccttctggtgctggcagctgggtaggaagacacgtttatcaataaacaattatggcacttgaaggccagtctctgatctcctgatttttccaagagaactctgaaatccagattttacattacatcttccagtttcttgacaaagaattcagcttcttcattgacacgccacgtaggtcaaactagacacagttgtagctacagtgtcactagctccttcgtacagatgagaaacttgaggttcacaggggctgacttgcccaagtggccccgtggagtgcgacccagggtctggctgcctccaaatctgctccttccgggggacatggggctggccctgactggccagctcagctgtctgcctcctgtagagcctctgcctgttggttctggctgtccttgtcttagaaggccatgttcaaaagagggtggaaggtgacgcagctgcctggctttgcgacatcagctctagtctaatgggctgggtcactcctgccgggctctgacgtggtgtgggcactgaggggcccgagatatgtcccggctgggttgagggtgggggtcaggtggactaggggggacctccctgtgacactggggcagcgaattatagatctagaggaggaaagctggcagaggagtccaagtggaccccaggcgtgtttcctatagtccctttaagaaaaccatgtttttgcaacatttttaaatcaggagatttcatatacatttctttatttctggttttcatggaaaacttctgtgttctcatcttccgactggctcactcagccacacagggaggctctctcccagcgtctccctaccacagggcctttgcacaggctgtggttgctgtggaatgtcccctgcgcctcaccttctagatttgtgagctcccttcctcactgccttctgttttgattttgggtctaggttgtgtttgtgtgtgttctttttctttctttcttttctttttttttttttatgagacagggtgttgcttggacacccaggctggagtacaaatggcgccattacagctcactgcagcctcgacctccttggctcaagtgaccctcccatctcagcctcccaagtagctgggactacaggtgtgcagcaccatgcccagctactttttaaaaaattattttttataggccaggcacagtggctcatgcctgtaatcctggcactttgggaggccaaggcagacggatcacttgaggtcaggagaccagcctggccaacgtggtgaaaccccacttctactaaaacaaaaacaaaaactaaaacaaaaattaaccaggtatggtggtgggtgcctgtagtcccagctactcgggaggctgagggaggagaactgcttgaacccgggatatggggtttcggtgagccgagatcgcgccactgcagtccaacctgggccacagagcaagactccctctcaaaaaaataaaataaaataaaaatacaaaaattagccaggcgtgatggtgggggcctgtagtcccagctactcaggaggctaaggcaggagaatcgcttgaacacagaagcagaggttgcagttagccaagatcatgccactgcactccagcctgggcaacagagtgagactccatctcaaaaaataaataaataaataaaattattctttatagagacagggtcttgctatgttgcccaggctggtctcaaactcttgggctctggtgatcctcctacctcggcctcccaaagttctgggattacaggcatgagccatggtgcctggcctatatttcacttacgtgatgactgtctcaaatcccagtctctccccaatccctgctgtgttttctctgtgctctgtcacgtggcatgcgttttacctgagttgtttggtgcctgcctttcctccgctatggtaaagccccacatagctgggcttttggtctgtcctggtcattctcccatccccagctcttagaacccgcctggcaggtggtagtgctcagtgcttgcttgtggaatgaatgaatgatccccctggccacacggagcccatgttcctgcatgaggctatccctgccctgagcccatccgctaccctgagctccggcgctccctttaggtggtgcatgggcccctgtttaccacagtcccttgactggtgtcacctgttgctgttaggacatattttaagatgcattatgacagcatggataggttgcctgtttaattccataagctccaggtgcgacagcctcatgtgcgaagggctttcccaccacctcctatcccaagctcccgccgaggagccccttccctggccgggctcgggcagctgttccggagccttgtggtggggcgtggggccctcatcactctcctcacaagcgtacttgtcccttcccctgcagaacgtgcgcatcgaccccagtagcctgtccttcaacatgtggaaggagatccctatccccttctatctctccgtctacttctttgacgtcatgaaccccagcgagatcctgaagggcgagaagccgcaggtgcgggagcgcgggccctacgtgtacaggtgaggctgtgtccaggtgagggtggaggggccggctgaggctgggcaggggaggggtctcagagtggacgggatggggaggctgctgactgagccccagagattgttccggaagcaggcaagtcatagtcggggtaagtgctagtcccagagaagtttttgttttagggttttttttttttttttttttttttttagagatgggatcttgctatgttgcccaggctggttttgaagtcctgggctcaagcgatcctccgcctcagcctctcaaagtgctgggattacaggtgcgaatcaccagacgttgcctagagaggttctttatggagcagggagggaccaatggtgtgcgtctgggtggagggtgcatgtgtgagttacacacatacatacacacacatacacatacacatacacacatacatacatacacacgtacatacacatacacacacacatacatacacacacatgtacctacacatgcatacacacatacacacacacacacacacacacatgcatgaccaggagcagggaccgaccccccagaccctatctgggccagaggaccgggtgggtcagcacgggaaggggtcagctgtttgtggaacatgctggcccaaggaccacagagttgtgcctttgctttctgcttgtcctgtacctggctgtggcctaggggaagtgacttcattcctctgagcctcagtttgcccgtctgcagactggagagacacaagagccccttcatggggtcaccgggacactcaggatgcactcggagctctgagacggctggcggatgtgcctgttacaactcccttacctcctggcgttttcacagcacctcccctcctccacacccccacttcccagttcacagacaggggagctgacttgcccccggcacacggtgttccagggatggggcgggcagagggtgttcccgctgttggagacccacagtctggttctgggaaagccaagatgaaaacccagcaaatgtgcctgaggtttgggaatgggaaacatgaatcagctgctgcattccgttcactcattcactcattcgctcgttcatttaacaaatgtttactgagcacctgctaggtgttggctgccgttctaagtacaggggacccagcagtggacagaatgggcaaaaatgccaaagctctctatactccttcattctgtgagcactgactgagcacctcctgtgtgctgggggcgcaggcagaccaaggccctgcctcaccaagctgatgttctgatggggagagagtaaagaagtggacaaataaggggaaatcaggcagccatcagtattgtgcagacaaaacagtgtgaagccggagtgcaggagggagggtggccttggggctcggtctgactggagggtcgggagcacatctgcaaagggacactcactggacccgcatggtgggaagaggccctggggagacagagtcccgggcagagcatgtgcaaaggtctgaaggctgggacagaggcctgtgcggctggggttacgagggagggagacagtggagagacgaggcctgagccttgctgagggcctcagaggtcacgttaggagcctgattttaacctgcatgcaaagtggggttgtggtccagagcatggcacgatctgatttctacttttttttttgagacggagtctctctttcacccaggttggagtgcggtggcgcgatctcggctcactgcaacgtccgccccccaggttcaagcgattctcctgcctcagcctcccgagtagctgggattacaggcatctgccaccatgcccagctaatttttgtatttttagtagagacgtggtttcaccatgttgggcaggatggtcttgaactcctgacatcaggtgatctgcccacctcagcctcccaaagtgctgggtttacaggcatgagccactgctcccgacctgatttccacttttcaaagattcttctggatggtggagagtggcttggagagatgagagatcataaggacagcagcagcaacagtcacagcagctgatgtttacctcgtgctttctctgcacccggcggctgtgttgattgctttccgggtatctgattgcttaatccccacagctgccctgtgaagtagggcttgtgattacttccttttgtagatggagagacgatggccgtgttgggtgggggagagcagaacgaggccgggtgggcggcgacaccatgtcctgcagtgggcaggcagcgggagggacagacttggcgaaggggccgagctcagctttggctgtggggccggaggtgtgcacagacgtccagggcccctggttcccaggcaggcattgcaggcgagtagaagggaaacgtcccatgcagcggggcggggcgtctgacccactggcttcccccacagggagttcaggcacaaaagcaacatcaccttcaacaacaacgacaccgtgtccttcctcgagtaccgcaccttccagttccagccctccaagtcccacggctcggagagcgactacatcgtcatgcccaacatcctggtcttggtgaggctgccctgtggcccacgccgcctcgcaccctgacctcgtcccctgtctctcctcccgcctgccccttgtgcagagagcagtccctgaggtggtcggagcgtggggactcacgcctggtgggtggctttcggccctgtgctgtctccaccacccccagtgggttctgagtttcccaggtgggtccacctgtcttggtttggaagtcctggccaaagtacttttttttcccttttcaatttacatttctgagatctccaaaaggggctgtcttgttgagggctgagccacaggcccgcctctgggactggggctggagttcacttagcctgagtccagtggggtgcaagggggagaaggggttctcgggagcacatgtggccttggcactggaggagcagagggtggttctggtgtcccagatgccccacgtggccactccaggggcctcctgcaccccagcatttcccttcatgggctctttgctgtgaggcccagctggggccaagggaggatgggccagccacgtccagcctctgacactagtgtcccttcgccttgcagggtgcggcggtgatgatggagaataagcccatgaccctgaagctcatcatgaccttggcattcaccaccctcggcgaacgtgccttcatgaaccgcactgtgggtgagatcatgtggggctacaaggacccccttgtgaatctcatcaacaagtactttccaggcatgttccccttcaaggacaagttcggattatttgctgaggtacgtgtggcctggtgagaagccaaagattcaggcctgtgtcctgtcttcccctcacacagcctggacactggtcaccagcttgctttgtagctggctggggatctagtggctgtgggttgtaagtgactgagaacctgactcaaaccggcttgagtgaaatggggaatgttggggctcatagaactgaaaatgctagggttggattcaggtacagcttgatccaggctcaaatgatgtgactgggccttagcttagcaaattggaggctttgctggaggaagggggcatggctgctggggagtaatatcacaagctgactcttaatcttgactcttggcaacctggtagggtcactgactgggcttcggagccaacatctcgtccatggagggtctgaccctgaccttggctccctcaccgcaggtttcactgagtccttgggactgctccagcctcagccatctctttggtctctgctgatcagggtagagtgctgggggggatatcgtggtgctgcgtgtgatagatactcagtacgtttttgtcaagggtgacgggctcctgtcgtgtgggtaaatgagcaagtttgggctaagtggcatgatgctgtaaaggcatcttgtaaatcctgaagtgctttgcaaatgaaagttattacaaagtccctagtttagtataatctacgtttgactgcatataatgaaaacctcacaagaaaagtctagcggtaggctgttcagtgttggtgtggtggcttcatggtcttaagtgatctggaagccttctactactgtgctctgccatccttggcatgtggttttcatcctcaagataacctcattgtccaagttggctgctagagtgtcagcaatcacatcacattccaggcagcacagcaagaaggaaaaaatggtggggctttggggagcagatggaggaactgggggtaaaacagcgtgttccagtttcctccctcttagggaggaagaaaaccaatgtccacttcctttctattggccagaactgagtcacatggccacacctagctccaggggaagctggaaaggtagccttttagctgggtgtgctgatgctctgagtatggtttgggtcttgtatgaaagagtaaggagagattgggctttgggtagtaactggcagtttctgatgctctccgtccattataatgatcatttaaggatcctattgggtgagcatttattaataataacaataataatgaaaataaagactatcattttgagctcttactgtgtccggtgcactgtacctggccgtttttgcacatgagtccctttagtgctcccctttgtagtggctctggttattcttggctccacatgggcacgtgacagacacacccgggatgctgggctggggccttgtgctgggtcctgctctggaggtctgtgatgggtgcagtcactcagccgggcaaccttggagctcctcagtgtgctccaccctgcaaagcacttctagatatttccttcagtcactcataccactttgtgctttgcatgtctttgggattagaaaccagcttctgggaaatgctctcggagcaccaaagcctgggccccactatcaagaacctcgatgggttaggacaggccaggttttgctgctgtgacaagcagccccggaatctccatggcttagaacaaccaagacttattcctttgcttgcactccacgtccagtgtgggtgactggggcacccgcgcttgtggtggtcacttggggatccaggctgagggaggctctgtcttgacacatacctccttggctgctatagcagcggcagagagcccggtgaaaggcgtgtgcacagtccttaaagcatccccccaagtgacatgccacttctcctttttcattgctcagggagctgacctggccatgctttattttatgctggagtagggtgtggtgggggtgatctgccatttacctgggaggaaagccagactctcctggagttaggaagggagggtggaacactgcagccacagaacccgggaccattcctcctagaaagctcccaagcctcctctcggtccccagacactgggcatttggcagtgaaccagatgctgggggccctgtccttctggtggagggggaggagggctcagcccagaatgttcagaccaggccggctcaatggcaggcctaagccttacgatgctgttccctgctgtgtctgtagctcaacaactccgactctgggctcttcacggtgttcacgggggtccagaacatcagcaggatccacctcgtggacaagtggaacgggctgagcaaggtgaggggcgagaggcgagggcccctgtcgccagggagaggggagggtgggcccggccatggctgctcgggagtggcagggaccagagagctccttcttcctttgtcgtgaagagggtgctgggaggatgaacactcttgaagttggaggagggattttacctctggttaaagcttgaccacccagaggggcaggtggggttagtgattgcttactgagcttactgagcacctggcatctgctgggaactgagtgctttcttcctttcgattctttacttacaaaaatgttttgaaggccgggcgtggtagttcatgcctgtaatcccagcactttgggaggccgaggtgggggggatcacctgaggtcaggagttcgagaccagccaggccaacatggcaaaaccctgtctctactaaaatacaaaaaattagctgggtgtggtgttgcatgcctgtaatcccagctactcatgagctgaggcaggagaatcgcttgaacacaggaggtgaaggttgcagtgagctgagatcacgcaatttcacttcagcctgggtgagaagagtgaaactcggtctccaaaaaaaagagaagagattcacattacaaaataaaacaagagagggagataagtgcccttagtatcacctcccacccctaccccttgccccagaggaaacccacagttatcagtttgggatatattcttcccatccatttttacccatgtgcacacctgtgtgtacgcagagaaatacggaattgtttcttctttgaacatcatgaaatcatactacgtgcattgttttgcaactggcttttttcaccttcgtgaccttttctcaatatgtgtgaaaatgactgtgtgacttcccactccccactccccgtggtagttactgcaaagaccctgagggctagggacaaatcgtaccccaaccggtgcccagagtggcaaaaatcaccatctgcaactggcagtagccattcacgatagatggagttcacattcattgtggcttgtatattccaatatactgtacatgtgcacgtgattttaaacatcctcatcatacagaagattggaaagtgagcagttggttttgtcgagtctgggtctcgctccccagagtcagttaacctgacaggttctgttttggggttgcccggtggtggccaccattatgattttaagtagtttgcctgtgtgccgattgttttcaggaggtgcctgttgacttccgctctgagggctgagcacagccgcgccccacctctcacctcacctgctcaccacacttcttttccagattcaggctggaaatgtgggtgataggcctattttgcagatgaaagaactgagtccctagcgaagttacacattcaggggtctgggagggggaagctgtggtaggcattctctctgtgtgtctacatagcctgccctcttcccaccgtgccagtattgggaattgagtggccgtgcgtgcaccagggtgagttaggtgtgcagcacctgagagggcttattaaggggccttggccctactgaggggtctagtctggatgcttccccccaggttgacttctggcattccgatcagtgcaacatgatcaatggaacttctgggcaaatgtggccgcccttcatgactcctgagtcctcgctggagttctacagcccggaggcctgccggtaatcactgggactcggggcctcctgggtttcctgggtagctcatggccaaattctgtggtgttggctgtgcacttggaaagcattttgactcatcgtggatttgactcagtagcccttggcaccagcttgaattctctttggtcacaccaccaaaagccaaactccagctgccaatgcctctacacagcccaaagagaggctgctggtggtggtttgcagccaggtggtgctgggctgggaggagggggcaggacatgtcaagtcacagggggccataaaatggaggcgagaggtgggctccctctggcgtctggctggtggcccccatgaccatctgggtgctgagacatcagctggctctgcttggccccttcaggctcagctctgtgtcccatggtcccagttgtggggtaagagtagacagtgggtggctcctacagcccttttctggaggccttgctgtgtcgtgttccattctggtcactctggaaaagtcctttacttaggaattcactcatgtggaccttgacttatctgccctcccagcaaaccctgtgaagccctactgtgtgccaggtgcccggtagtgagagggtgggccaagtctccgttccccaggaggctgtgtcctatcagggcaactcaggcaaatgcacaaacactagagtgtcagagagtgacagtgcttttgctctgtgtggccactttttactattttaagtttttacttatttatttatttaattttttagagatggggatctcgctatgttgcccaggctagtcttgaactcctagcctcaagggatcttcctgcttcagcctcccaaagtgctgggattgcaggtgtgagctactgtacccagctgactttaaaagctgaattttaaacttaaagaaaagttgcatgagaaatacaagtggcccccgtctccccttcacccaggttcactagccgtgttaagccccccaccccctcttctcgccgagtgtctttttccagaaccatcggagagtaggttggaggctgtatgcccccttacctccaaatactcagtgggtgtttttcagaaacgaggacattttcttacataaccataatgctgttatcaaaatgagaaaatttggcattgacataatactgttatctaagctggcactttcctataaatcaaaatatgcaaggcacacatgcaatttaaaattttttagtggctgcattaatacaagtaacaagaaattggtgaaattatttttaataatgtattttatttgacctcatatatcaaaaatgggatcatttcaagtgttattgatgaggttttttttttgttttttttgctagcaagtattagaaatctggaatgtattttatacttgcatcccaatttggactcaccccatgtcaagggcgggatggacagccatgcgtgctgagtggctgccgtggacagagtgggtagcacagtgcatgttcaagttcagaagtgcttttgagaaagtacaggagcatgaatggatggagggtggatggggtgggtgtgggggacggtgctgccacccgaggaagtgacagctgaactgagatctgactgaagggctgaagtctggtggatgaagatgccagaggagactgttcttaggcagagggagcagtgatgcaaagggcctggggcaggagtgagtgtgcttaggaactgcagggaggccctgggcacaggaagttggggcagggctgagcagagcttatgcaggggctagataaggtcaatgaatcctaatggtaggttagactagaaagggtcacagattttcagcaggggcatgatatattctgttctttttttaatttcataactttcaaaaacaattttatttttagagactgggtctcactatgttccccaggctggtctcacactcctgggctcaagtgatcctcccacctcggcctcccaaagtgctgggattacaggtgtgagccataatgcctggcctctgttcttttgtaaaactccatctggccacggctaatacattggtgtgggtggggaggcagagtcggagcggagaggcctgttaggaggtcgctgcagctccgcgggtgagagatgggggcggtttggacccgggaggtggtagcgcccgtggggagaagtggctggatctgggcagcctttggcagggcctggctctggccgccgggtctgggtgtcccctctcatcctgtctgtcccctgcagatccatgaagctaatgtacaaggagtcaggggtgtttgaaggcatccccacctatcgcttcgtggctcccaaaaccctgtttgccaacgggtccatctacccacccaacgaaggcttctgcccgtgcctggagtctggaattcagaacgtcagcacctgcaggttcagtacgtgccgtcccctgtgctgggatggcgggagggtgtgagggtggggccagctgagggtttatctgcccagtgctgtctgcttaatctctggcctctgtactcttgataatcccattaggcgaagataatgaggccgcaggaagataatctgaaaaggaagaaatgccaggtctattagttgctgtcacaatatattgccatgaacttcagggcttagaacaacacacactggttatcttgcagttctgtagtcagaagtctgcgtgggtctcaccgcgctcagaacaaggcggctgtgttccttctggaggctctaggagaagctgcgtctgccttttctggcttccagaggcccctctgtgtttcttggctcccgggcccttcctccacctttgaggccagcaacatggcatccttctgatccactctgtcctcatatctcttcctctcctccctcttctgccccctcttccagttctaaggacccttaagaccacatcgtgctctcctggataccccaggacaatctccccatcttgtttattattattttttttgagacagactctcactctgttacccaggttggagtgcagtggcgccatttcagctcactgcaacctccgcctcccaggttcaagtgatcctcccacctcagcctcccgagtagttgggaccacaggcgtgcaccaccacacctggctaattttttgtatttttggtagagatgggggtttcaccatgttgcccaggctggtcttgaactcctgacctcaagtgatctgcctgcctcggcctcccaaagtgctgggattataggtgtgagccaccgcgcccagcctatttttatattttgagacaaggtatcactctgtagcctggagctggagtatagtggtgcgattatagctcactgcagcctcgacctcatgggctcaagcgatcttcctgcctcagcctcctgagtagctgggaccgcaggtgtgggccatgatacctagctaattttatttttgtaaagtttttatagagatgttgtttcaccatgttgcccaggctggtctcaaacacctggcctcaagtgatccacctgcctctgcgtgttaaagcaatgggattacaggtgtgagccactgtgcccggcccaatttctggaccttcaaggcagctgctgagcaggcccagcgcccgtttaccctgtgacctgacatagtcatgggttctggggcttagggcatgtacgtgtcctaaatgacatgaaatgaggctggcgagggtctgtgtgttacgtaacatcttctcgttccgcagtgtgggtggctaggcagatgtgatgactgctgttggcgtcggtcccctgacattgttggtgtgtctcaattgtgtgccagtccctgagacacccccacctcaagttgctcagtttggaccctcgggcgtcagtttgattccctgtcctcacccagctcttccagtgcgtcaacaagcccagatggctttacctccaggttgagtcctcactccttcctctctcttgctccccaccccaacccccgcctcattgtccaggccacggacacgtccttcctggtgatccagccctttcagtagcccatccctcaatgcagtgttgccgccttaccatccatcccctagaccatccagtgcggtcactgctggcctcttgcggctgtttaaattgaaattgatttaaacgaaatcaaattaaaaggcagttccttggttgcaccggccggaagttaaatgctcataagccatgtgtgtctagcagctactgtcttggatagcacagatagagaacatttccatcatcataggaagttctgtagcactcccgacagcagcggagggatcttttaacaatgcaggccgagtgtggtggttcacgcctgtaatcacaaccctgtaggaggccgaggtgggaggatcacttcaggccaagagttcgagaccagcctgggcaatatagcaagacctctctctggcaaaaaaaaaaaaaaaaaaaaaattagctaggcatggtggtgcatgcctgtagtcctagctacgtggaaagctggggtggaaggatggcctaagcccagaggtcaaggctgcagtgagctgtgatcaccccactgcactccagcctgggcaacagaggaagacccatctcgaaaaatatgcagatggccgccgtcctcttaaaatgtctggcagctctgtctgcattcatagtgaagtccaaactcccaccatggccctgggccctgcaggatccagcccctaccggcctctctgaaggatccagccccgccagcctctctgactccatttctccctacacgtcccctgttcattattctccagccctgatgccttcgccctttttctaaagtataccaaggtcagtgccttgcactgtggtttgcatgggttgcttcccctgcttggagagctctttgtctggatttctgagtggatcatccctcaccttcttttggcctgcatgcaaatgccacctcctccgggaggcctcctctgatttcctgttctaaagttgccccctctcccacctgctgctccctatggcttcctcttcttgtcttcttgtcttggtcttcttgtcttcctcttcttgtcttggtgctcattgctccctgaactcatggactgtggattttattcattgccccttccattcactgtcatccctgtaggcagggccccaagctcctcttgttggttttattcttagcttctagaactgtgccccgcatgtaatgggtactcatacagtatttgaatatagggatggtgagtgcgttctgtacttaggaaattgaggcctgatgctggatgcgaccaaggtcacagggttggtaggaccggaagcggccctctatttgactgtgtcttgccttctgggagcctttttggttgaagccccgtcctccagctggcaatggcgactctaaaggactggtctgcaacaggggtcaggaggaggggctgtcaacagattggatgctttcccctatttcaggcagaatggaacaacctgtgaatgaatggtttggagctggggcctgggacgcccgctgctgtctcctggtcctgtctggcccgtctgggcattggcctctgcttgcttcattctttgctggtatcggcggggatttctgctcctaaggttgaggatgttacacacccaataggtgtgctacagcaactgtcgcaagtggcagatgctggactccacctgatttaggccaaaagggcacttcttggtttgcgtaatgaaaaattccagggcagatctctgcattaggcacaaatccagaacttagatgttgtctggaagctgcctctgccaagtcccagctcagttttctgctggactggctttgctgccaagcaggctctccctcctggctgcctgtggaggctccaggctcacctccgcccagctccgagtcctgcagaaagggggccacctgtgtttccttcactccagcagaagttccagggtttgctctaattggtctgcctggctcccatgcccagctgtaaaccaatcacagtagccgaggtggactatgctgattggccaggcttgtgtcacatgctcagatggctcctgggtgggccggccccactccaagcacaaggctgaaagtagggaaggcttaaagtaggggtgtaggtaccaggagaagggggagaaacgacatgcccatcccctccaagggcgtgggacgaggtgtgtcccgccttctcttagcacatctgccaaaagaatttcaaaagcgcaaaggaattttaaaatctttatttaaatagagttttttcttatatttatttatatttttgagacagggtttctctgttgcccaggctcaagtgcagtggtgcaatcacagctcacagcagccttgacctcctgggcacaaatgattctcccacctcagcctcccaggtagctgggagcacaggtacacaccaccatacctggctaatttattttatcttatttcaatttttttttttttttttttttttgtagaggtggggttgtgccgtcttgcccgggcttagtttttgcttctaaataaaatatacatagatacaaagaagttcccagatgactcatgcagtttttggggttttttgctttgttttttgagacggggtatcactgtcgcccaggctggagtgcagtggtgccatcatggctcacagcagtctgacctccatcactcaattgatcctcttaccccagcctcctgagtagctgggactacaagcggttgctaccatgcccagctaattcttaaattttttttaagagacggggtctcaccatattgcccaggctagtcttgaagtcctgggctcaagtgatcctcccgcccaaagtgctgggattacaggcatgaaccgctgcgcctggctgacacctgcagtttgaaacttcacaaagtcaacgcaccccgtggccagcaccctgactgagaaacagacaggacaggccctggatgccactcgcggtcctcccaccgccctgacatccagccccggagctcagctggtttgcatcttcatgtgaatggacccataatgctagactccttttcctccttttctggcccgtgcaccccttagcaccctggtgcaattcgtccgtgacgttgtgggtggtagcagcccctcctctccgttgctgtgtggtgttccatcgtgggtgccacctccatcttctccttccattgctcctaggcatccaagttcctgtttttcgaccgtgaccgtggtgcacacgtgtcgtttggtgcacctatgtctgtgtttctgtggcatgttatctaaagagtaaaggtaccatgcctttgcctttctgggccttgaaatctgttggactcagacaactccctcatctcaaacctccctgttgcgtgagggcatccgacttgcctcacagagccaactaattatcatcggtggcaatcctgggcaattatgtctggctagatatgccataaagctacaaattaattaccacttacagctgggaagatctctctcggcgtgcttggtaataacattggaagaaacacgtgcgtgggtccatgcaggctcggcctctgaagcaagggcgggggctggcaagttgttccatcccaccttggtctccacctggggctgtgggcaggccagggcttgtttgagattcctccagagttcggctccgtggctgcctcctccacggaggaggcacgagaggcagcgttttccagattgtggaggacactgtccctgcgggtgcttgggatggcttcagaaggtccaaggaggtgagagtgagcttctgggtccatgctcttttcctccttgccatcacctgcaggagaaggtctcttggtgttgagaggacttgaagagccttccacactcatcagccttttttgttttgttttttcttttaacagaaaaagagcagggctcccagttaaagcctcatgcagtaacaggttctagttagaacttacaacatcattattttccacggtattttttaactatgtcttttttttttttttttgagacacagtcttgctctgttgccaaggctggagtgcaatggtgcaatcttggctcaccacaacttctgcctcttgggttcaagcgattctcctgcctcagcctcctgagtagctgggattacaggtgtgcaccaccaggcccggctaattttgtatttttagtagagacggggtttctccatatcggtcaggctggtcgtgaactcccaacctcaactggtccacccgcctcggcctcctaaagtgctgggattacaggcgtgagccaccgcgcccggccctttattttattttattttttttgagacacagtcttgctcttttgccgaggctggagtgcattggtgcaatcttggcttactgcaacctccgaaaactattgtccaggctggagtgcagtgatgcgatttcagctccctgcagcctccgcaacctctgccgcccaggttcaagcaattctcctgcctcagcctcccgagtagctgggattacaggcacataccatgctcagctaatttttgtatttttagtagagacggggtctcaccatgttgcccaggctggtcttgaacttctgacctcaagtgatccacccgccttggcctcccaaagagttgggattacaggcatgagccaccgtgcctggcctctgattcaggtttttgttttgttttgttttgttttccttactgaggcaaaattcttgtaacataaaattaaccattttaaagtgaatgattcggtggcatttagcagggtcacaaggttgtgcagccatcacttgtatctcgttccagaacatttctgtcaccccaaaaggagacccagactcatcagaagtcactccccgccccctcccccagcccctggtcaccacccgttggctctgtctgtggattagcactgtctggatccttgtgagctttttaaaaaaaaattgtttttcttttgagacaggatcttgctctgttacccaggctggagtgcagtggcacggtcacggctcactgtagcctcaacctctgaggctcaagcgattttcctgcctcagcctcctgagtagctggaactacatgcaggtgccaccatgcccggctaatttttgtagagataggatcttgccatattgtccagcctggtctccaattcctgggtgcaagtcatctgcctgctgaggcctcccaaagtgttgggattacaggtgtaagccatggcgcctggccctcgtgagcttttgagagaggcccgctcgctgttccttgttaacttgtccttcaggcctgttgtccattgtcccgagggtgagctggtgtttgcctggtttggttggtcagtggcgaggttgagctcacatttgtagcaggtgtgtctacagggacacactcctgtggatgcagggagatctggccacaggtgcacacacctgagctccgatcattgctgcgtgtcctgcaggggacagtgtgggctgcttggcttgcgcttgagactcccctccccacacccaagttcaaatctggcgttgccttttccatccgtgcctccctagcacccttgtgcaccatgcatttccccctccccacgcttgcttctgccttcccttccacctggaatgcgcttcccgggcatccttcacctggctcctgtgaagaggcctcttccttcttttggtctctcctgtcagaatcagcggctcctgcctcaccccttctctggcgcagagcttgtccctcatcacagggcctggggctttttacagaatggaggaagggatcctctctgtctggttatcttgtcatcgccacgggggtgccctgcagaccacagctctgtgcagacctccggcctggcaggacctgccaatatactgtccttgtctgatgtcccctccctgcccctcttctaggtgcccccttgtttctctcccatcctcacttcctcaacgccgacccggttctggcagaagcggtgactggcctgcaccctaaccaggaggcacactccttgttcctggacatccacccggtgagcccctgccatcctctgtggggggtgggtgattcctggttggagcacacctggctgcctcctctctccccaggcagagagctgctgtgggctggggtggtgggaagcctggcttctagaatctcgagccaccaaagttccttacttcaccccgactccatagttcaaggtagttcaagggttttatgatccctgtactggtttctataaatgggctctaagacagtaaattaattagaacttatcagctgggatgtctcctacatgtgagctggaggcagccctctggatgtgtcaagataccataaagatctttaggtaccaagaagagcctggggtattttgcagataaatcacacagggaatttgtcccgtgtgaagttctgtctacaagcagggagctggacatgtggccctcccaaggacactccttcagcttgtggcctcttctcttggcacctccgttctctgtaaaatatgcccagttggtcttggtggctgctaccattgattcagaaatctgtggttttctgtttcctgggtgggcacttgtggtctatcccatgggcctttaacaaaattattattatttttgagacagggtctcactcggttgcccaggctggggtgcagtggcatgatcatggctcactgcagcttcgacctccctgggttcaggtgatcctcccacctcagcctccctaagtagccaggactacagacatgtaccaccatgcctggctaatttttatattttttgtagagacgcggttttgccatgttgcccagtctggtctcgaactcttgggctcaagcgatcctcctgtcttggcctcccaaagtaccgggattacaggcatgaaccgccgtgcccagccaaaattaattctctaaattgaaaaagaaaagctgtctatttttgagtgtacaacatgatgttatgatgtatgtatataacttgtggaatacctaaatcaagccaattaacatatgcattacctcacatactgatgatgtattggtgctgagaacatttaaaatctactgtcagcaactttcaagcttacaatacattgctattcactctagtcactgtgttgtattgtatagtacaatacagtgactgttgctctatttcccagtaggtctcctaaacttactccccctgtctaactgaaattttgtatcctttgacggacttccccatccctgcccctggtagccagtattctaccctctgcttccatgaattcaacttttttttttttttttttctgagatggagtttcactctggttacccaggctggagtgcagtggcacgatctcggctcactgcaacctccgcctcccgggttcaagcaattctccctgcctcagcctctcaagtagctgggattacaggcacacaccaccacacccggctaatttttgtatttttagtagacacagggttttgccacgttggccacgctggtctcgaactcgtgacctcaggtgatccacccgcctcggactcccaggttgctgggattataggcgtgagccactacgcctggcctgaattcaactcttttagattccacatacaggtgaggtcatgcagggtttgctttcctgtgcctggcctattttacttcgcatagtgtccccaggtccgtcatgttgtcacaaataacaggatttccctgtttttatttatttattttttgagacagagtcttgctgcgtcacccaggctggagtgcagtggcatgatcgtggctccctgcaacctctgcctcccgggttcaagcaattctcctgcctcggcctccagagtagctgggattaaaggcacacaccaccacacctggctaatttttgtatttttagtggagacgggatttcaccatcctgaccaagctggtctggaactcctggcctcaagtgatccgtccacctcggcctcccaaagtgctgggattccaggcgtgagccgccgcgcccagctggatttccctctttttaaacgctgaacagtatcccactgtgtgtgcaccacgtttctgctgcccattcattcactgacggacacttcgcttgattccgtatcttggccacagcgtacatgggagtgcccctgtccctttgacacactgatttcatttcctctggggggatgcccggcagtgggatcactgatccgatggtagttctggttttcgttgtctgaggaagctccacacgtttgccacaatgctgtgcaccttaggcccttcccgaagctccatggcggatgctgttctgcaccatttttctttgtcctcccaggcctccttagccgctgactaggccctctcggccccggccccagccctggtctctgccttccctcttttagttaattcctcctccagcctctcttgctctgctggcttccggagaattccaccatgaacacagtctcctgtgcgctctcagtgatcgctttcctttcagggcacggattttctttcttcccctcacatcaagaaagaaggggttaagtttgggagcccagagagaggcaaacagctgttttgccgcagccactttagctgctgcgtccaattctacctccagatgagcttgaggccgacggggagaggaagtggcctttatttctttgttttttgagctgggcacgttggggagggggatcaggagatcagcttgctgcctgttggcctttagccttgaaaaacgaacgtgtgttggaagctgcttccgtgtggccacttttctgctcctgaaactgggggagggcatggggacgggggactcaacaggacgctgcttatggtggtatcacagctaagacttattgtaatgacagaattcaaagcaaaattagcaaagggaaaaagcaccttgggtgaagtcgggggaggccaggctggagcttccagagtcctcttccagggggttcctacaggatgcacttaatgtctttagcaatgagttgtgacaacatgtaggagatgttgtctagcagggaagctcattagaaattcagtgcccatggtgttttgctaggggccagtcatgtgggcacctctgcctggcaggtaccaaaattctaggctctgggaaggaaagcaggtgctgagcaagaaccatattgtttgtacaaataatttcggcccagtgaactactctcatcagttaggggatggtggggaccctcctgaaatctgggttcccagatgccagcagaattcctaaggagagcagcttcaggcctgtggcgtgaactctgttctactcacgggtgatctcatgcccatcccaccaggctctcgagggcaagcactccccagtcgtgggcgtaagtgaggcctttaatgagctcttctttgccacaggggcctggaaggtcctcagcatgctgggccataatgaagaaaacatcctttccctatagtgtacgtgataataacctaggcatttatggccctgcgtgtggctatcttgcataccttacttttgctcttgcaaaaattctgtcaggtcgggagagttctctctgttttacagatgaggacgcgactctcagttaagaagaaccaactgcagttctctgacctcaaatctagttttatttccactatcatttcctgacttcattctggaaccaccttcctgttgtttttgatgacacatgtgtgtcacttcggttatttacttaaaaaaaaaagtctcgttaaaaagagctgggtatagtggctcatggctgtaattccactgctttgggaggctgaggcaggaagatcacttgaggctaggagtttgacgccagcctgggcaacatagtgaaactctgtctctacaaaaataataatgataaataggctgggtgtggtggctcacgcctgtaatcccactttgggaggccaaggtgggcagttcgcttgctgccaggagtttgagaccagcctggtcaacatggtgaaaccctgtctttactaaaaatacaaaaattagccgagtgtgctggcgcacacctgtagtcccagctactggggaggctgaggcaggacaatcgcttgaactcaggaggcagaggttgcctgcactccagcctagatgactgagtaagactctgtctcaaaaagaaataaaaataaatttctgcacaaaggaagctttttcttactacctcaaataggaaattacaaaattctccaaaaaaagaagacaaccataaaaatgaacaaggaaaaaaatattaggctctatgtaaaatattgttgtctgtcagcaggagtgaacctggggccagctgtcagcaccattgttagaagtggagattttgtgtaggtgtattagaggggtattaaagaccatgcaaacacctggctgagacctactcttcaaaatgatcaggaggagttgggagtgaattgagaagggacttttgtctgttttattgaatgtggaggttgagagggagcatggacaaattgccattctgcactttgggaaacgctgtcttaggaggacaggtgaaagtgattaggtattttccaccctgagacagccttgctttatagaaggaacctctttgaggctgtgaacataactgtgtgggaagcacttgtttccctataaggggttagaatcaggagaggagatcccagtgcacctgcccagcatttctagaactgttgaccccccccagcctgtggcttgttttaggtaagatacaagcaagctccactgggcagttagctgggacgcccaccctcttgactgggaccagggagaggagggttgacggtgtccctggagcttgggggtggccagtctcctcactgtgtttgttgccgcaggtcacgggaatccccatgaactgctctgtgaaactgcagctgagcctctacatgaaatctgtcgcaggcattgggtgagtggggactgggagctggggctgcattgctcattgagagattaggtgctcagtgctccagtggtcccagactccagtgacataccccaggaaccagggcatggggaggggagagggtcctattgggggtggaatccagtccctgctgatcttctccctgaggggtcttggttttgagccaggtcctgacctgcatcctgatattccttccccagaacaccacttttctttctcttttttgttttgttttgttttgtttttgagatggagtctcgctcttgttgcccaggctggagtgcaagggcgggatattggctcaccacaacctccgcctcccaggttcaagcgattctcctgactcagcctcctgagtagctgggattacaggcatgtgccaccacgcccggctaatttggtatttttagtagagatggggtttcaccatgttggtcaggctggtctcaaactcctggcctcaagtgatccacccacctgggcctcccagcatgctgggattgcaggcgtgagccaccgtgcccggccttcacttttcttttttaacattcaccccctccctgccaattagccagagcttcaatccaagctgtttcctacacgacagagtggcagaaatgaaagcctggcaaaaccaaatgtttgaaaatggaaacgctgaggcaggagaatggcgtgaacccgggaggcggagcttgcagtgagccgagatcgcgccactgcactccagcctgggcgacagagcaagactccgtctcaaaaaaaaaaaaaaaaaagaatttttcaagcactgatttcctctttttgatttttaaaataaaacagctttatgcaaatataatgcatgtaccataaaactcacccctttaaaatgcacaattcaaaataaaaaaaataacccccctaataaaatgcacaattcagtgatttgcagtatattcacagaattgtgtatctatcaccacaatcaattttggaacattttcatcatccccaaaagaaaccccacactcattaacactcacttccctgtcccctcagccccaggcaaccgttcatccacttcctgtctctgcggacttacctattctgggcatttcatataaatggaatcatacactatgtggtcttttgcgactggcttctttcatttaggatcacgttttcaaggttcatccatgtcgtagcatggatcagtatattttatggctggataatattccattgtctggatagaccacatttatttatcggttgatggacgtttgagttgtttccacgcctgggccgttatgcataatgcagctgtaaatgttcttgtgtcagtcccagtgtggacatctgttctcgttttccttaggtatgtaccgaggggtggaatcgctgggtcctatgttaactctttgtttaaccgtttgaggaacagtcagacttgcacagcctctgccccccatccccattctttttttttttttttttttttttgagacggagtctcgctctgtcgcccaggctggagtgcagtggcgcgatctcggctcactgcaagctccgcctcctgggttcacgccattctcctgcctcagcctcccaagtagctgggactacaggcgcccgccaccgtgcccggctaattttttgtatttttagtagatacagggtttcaccatgttagccaggttggtctcgatctcctgacctcgtgatccgcccgcctcgggctcccaaagtgctgggattacaggcgtgagccaccgcgcccggccccatccccattcttagcagcagtgcagcagggttccagttcctccccacgcgcaccagcacttgctataacattacacgttgctagaacttggtgagggattatactgatttgttgctatgtcagtgtctgtacttcttagcatatctgaaatagtttcgttaaaaaaaattctcttagaaaaatccctgggttgcaggaatgtgagcatctattcagctttgtcaaatgcctctcggctggaaagaataacactttgtcagagcacggcagcgagtaataactgtgagctctcttccttcatcccgcccttgcattttatttttatattttgaggccacttagggaatttgttcttgatggatttgtgggtggggaaacagccccaggcatggaagaggcgtttgcagcccaagtcctccctctggttccaccgcgtggcacctgggctgctaactgggatgcaactggggccaagtgggtgacccagatagaagaggcgacctggggccgaggatacagccccttcccagcaccagctgactgtagccccatggaaatgcgggctcagtgtggccacatcctctgcatttttcaaaaggacttccaaatctgaattttaacaggagctctgtcaatttttacttattgggaggtaattcacattctttttttttttttttttttttttttgagacgaagtcttgccgtgtcacccaggccagagtgcagtggcatgatctcagctcactgcaacctctgcctcccgggttccagcgattctcctgcctcagcctctcaagtagctgggattacaggcgctcgccagtacacccagctaatttttgtatttttagtggagacaggatttcaccatgttggccaggctgttctcgaacttgtgacctcaggtgatccgcctcccagagtgctgggattataggcatgagccctgcgctgggcctaattcacattcttaacaaacagttcacgcgggcagctggattgtgcctgccagtgacctgtggaccggtcacccaacctctctgggccgcacagctgctgacctccctgtggactgggaacaaggcactccaggaaagtggtctcaacagcagatgtggagggccacgagggatggccgtgggaaaagtctagagacacagctgccgggaagcagagctgtctcgtgacctgtcggggaagcttctgtgctccttgctcgctaggtaaaggcagtggggttgcatgttacttgaatacaattcccattggttcttacaaagtctttcagagaaaagcagccaaagtaaatggtaccgtctgttgtctccccatcgtgtttcgtcctctgtagggtgatagtgtgagcccatttcactgtgcaataccctacttaacaaggggcctgagagacctccaataattgtgattgggggatttcagcctttttttttttttaagatggatcttgctcttgtcgcccaggctggagtacaatggcgcgatttcggctcactgcaacctccgcctcgggttcaagcgattctcctgcctcagcctcccgcgtagctgggattacaggtgcccgccaccacgcccagcaaatttttgtatttttagtagagacggggtttcactgtgttggccaggctggtctcaaactcctgacctcaggtgatcacctgcctcagcctcccaaagtgctgggattacaggcgtgagccaccgcgcccggtctctgattgtggtatttgagccttttgtgctgactttcgtcaccgcccctcagtgacttccatctcccctccctactgctgtgcatggcaaagtgacagaatatttgtgtgtccatttctttgctgggatttaacaattataacaacaacaataataaatgtgccaagcacttttatatgccgggtaattttcgaagcactttacatgtattactgcattgaatcctccctagagtcctaggaagagttacgttataatatctcgcttatacagaagggacacaggctcagtagcacgcccaaggtcacagagctcgtaagtggctgtgtcaggggtcccaaggccaccgcaggctcgacgatttgctgggaagcctcaggacgaagcatatggttgtacacgtggctatgatttattacggtaaaaggattcaaagcaaatcagcaaagggaaaagccacacggggccaagtccagaggaaagcaggtgccagtttccagagccctctcccaggggagtcacccaattcttgctgcaaggagttgtgacaacccacgtgacatgtcatctggcagggaagcccgctagagagactgagtgcccagggtttttactaggggctggtcatgtggccaccctctgcctggcaggtactgaaattccagacccttagaaggcaagctggtggtcagtataaaccacattacttgtacagattgctcaggcacagtgagccatccttgtcagttagggagcaatgggaggcctcccgaatccaggctcccagacgccagctccgggccagcattgccagcagcctgtgtggggtggaagggctcgggcctgccacgtgagcacgtgcctgcacagcggcccaggtgggattcaaatccaggcagcgacgcttgagtgtgcactattaaccacctcgccacactgccttttctgctagacacctgttgtgggggggtctgtgtggggcaagtggtgagccagcccaccctgctgctccatactgagtgtgagttgctgtattcatttccttttgctgctgtcacaattttgccacaaatgtcatggctcacttttaaaaactatcttgcagtgttgggagtctgaagtctgaaaggaacacaacaaggctaagatcaaggtatctgcaggccttgttccttccagaggctccaggggagaacctgtgccttgccgtttacagcttctagaagctgcctactttccttagctcatgaccttaatcctagccctccctgttttgttgttgttgttgttgttgttgagacacagtctcgctctgctatctagactggagtacagtggcatgatctatagttcactgcagccttggcctcctgggcttaggcgatcctcccacctgagcctcctgagtagctgggactacaggcatgtgccaccataccctgctaatttttgtgttttttttgtagagacaggggtctcactatgttgcccaggctggtcttgaactccagggtgcaagtgatcctcccacctcagcctcccaaagtgctgggattacaggcgtgaaccactgcacttggcctctccctctttaaagccagcagtgtagcactgtccaatttctctctgcctctaacctcctgcttccctctttttttttttttttttttttttgagacggagtctcactctgtcgccaggctggagtgcaatggcatgatctccgctcactgcaacctctgactccctggttcaagtgattctcctgcctcagcctcccgagtagctgggattacaggcatgtgccaccacgtccggccaatttttatatttttagtagagatggggtttcaccatgttgcccaggatggtctcaatctcctgaccttgtgatccacctgcctcggcctcccaaagtgctgggattacaggcgtgagccaccacgccccagcccctctttttaaaaattaatttttctttttttagggttttaaaatttgtttttgttttttcgtttttctttctcttgcctgattgctctggctaggacttcccgcttctctctttaaggacttttgtgattctctggggcctacctaggtattccaggatactcttcccatctcagaaccttgatgtaaccatatctgcatggacccacctagatattccaggacgctctccccatctgagagccttgatgcagtcatgtctgcacggtccccttcgtcgtggcaggtcacagtttcccaggtgtcgcattggtcttccggtctccttaggcaccttttggctgtgacagtctctcatctctccttcattttgatgacagtgacacttttgagaagcactggtcaggtattttgtaggatgaccctctactgggattggtctggtgcttttctcatgattagactggggtgatgggttttgggaggaggaccgcagagagaaagttccagtttcagagcatcttgggtacattccgtcaacatactgtatcactgttgatgtcgaccttgatagcctggatgaggtcatgcctgtgacgtttctgcagtatcaagtttacttttattctccctttggattttattatctttttaacttgacgtgtaagttttaacttcacaggtaataagaacatatcttcctgaggggaagaatatggtttcctgtgactccccgccatccccagccgtacccaccatcatcaatttgctgtgcttccttccaggccttttcctacttatttacattcatatatatgtggccatagagaagatacatattgtcgtttgtctgtttgtctttgctagtccaagcaacactgaacatctttgtgcctctgtgtgcatgtgtgagcatctctagggcagtttctgaagagcgtaattgctgggtcgtgaggtatattggtggaattaggtttggcagtatagatcagtaaactcaacagttgtggctcaaatgggacaaaggtatattgttattttaaaaatcttcttttagaggatgtctggaggcagacagtccaagtatggcaagagacattcatagtccaagttccactcatctttctgttccattttcccaacacatggcttccatcctcaaggtcacctctggtcccagtgtctgcagagctccagcccttgcatctgcgtttcaggcatctgaaagggaggagggaaaaaaggttcacctcccagctgtgaaagcttctttttaagcagccctcccggccatcccacgtaacgcttctgcgaacatctcattaaccagaacttggtcacagagcctcacttgccacaagagaggctgaagtggagtctttaactgggtgcattgccatcctgagtaaaatttgggtcctgtttctaaaagggaccaatggattttggctgggtcactggtggtctctgccctgtaggagatgtgagtttttagtttaaaaagattattatcaagttgtcaagctctttgccaggggagattccttctggcagcacatcgaaacactggttccctcagcccatgccaatcaagtaccatggaccccttatccctgggggtatattccaagacccccagtggatgcctgaagctggggatagtactgaaccctgtatagcatatactatgcttcttcctatacacacacatctatgataaagttaatttataaattaggcatagccacaattaacaataactaagaatagggtaattataacaaatactataataaaagttatgtgaacatggtctctccctcaaaatatcttattgtactgtactgagggtaagaaatggcagaaatcaaaaccatggataaggagggatgactgagattgcagaatcaaatccctcctggcctcagagcttatgatcacaggttcaaagctgtgtgatgtcaaacagccctgtgggaaaacatctcaccttgtcaactaaagaaaaaaaaaaacaaaacgccttttaaagatttaaagttagtcttatttacaagtattattgagggctgtagactgagaccttcagcctggggacagttttgtcatatggctcctaaagtgtttcagctcattgtttatatttggtggtgagggtttagtgtgtgcaaaattatactaaacctgtttagatgttgtattcaagcagaattagatcaagtttgggtgtaagactttgtttcacacagctatgtcttgcttatttccagacaaactgggaagattgagcctgtggtcctgccgctgctctggtttgcagaggtaagggtgcgttgggcacagcgtcgggggcttttgttaagagccaatgtgggcatttgaggcaggaggcggggggagcagcttgtagaaagggagagggctgagccagggtaaccggactgtgacatggaccagcgtatcagaaacttcaccctgtccaagcaccctatgtcagttatcccaccaaggtgaaagggatccctagagatggggaagacagaagctgcatgaagaggtaaagtccctggccctgggtgtaaaataattttgttggggcatatgacctcttctcctgaaagtggggaagttggtttccaaggtgtcagcttttctcttaaacttacttctctcgcagcttttcagaattccttctggcctagcttgttttattttattattttattttattttatttactgtatttattgtttcttgcccacctcgttttaaatcagggctagctaatggccaggacaaacaagcctccgaatgtcaagtttacttcctactcacagccgaatctgaagtgggttgatggggaggcagagctctgctccctgcagtcatttagggttccagggccccggtggccccgccatcctggagagcctccattcagtggcagggaacgagatggagagtcacgtgaggccaggtccacctcccattggtcaggacacgatcatatggccctgcccaactgcaagggagtcggggaattgtagtctcaccttgtgtcctggagggaggaggtccctggcaggctccaacacatgctttagccgggaagcttgaggtggggaaaagctgaggcgggcacagaggaaggtgttgggtggcatctgcgctgtagcccgcagcgtgcggccccagctcatgtgtttgtcattctgtctcctcagagcggggccatggagggggagactcttcacacattctacactcagctggtgttgatgcccaaggtgatgcactatgcccagtacgtcctcctggcgctgggctgcgtcctgctgctggtccctgtcatctgccaaatccggagccaagtaggtgctggccagagggcagcccgggctgacagccattcgcttgcctgctgggggaaaggggcctcagatcggaccctctggccaaccgcagcctggagcccacctccagcagcagtcctgcgtctctgccggagtgggagcggtcactgctgggggctgcgcagcacgcttgcgtcttttgcatgccgcgttgccactactctgcctgttctggaaggcctgggaccctcccttggagggggcacaggtgggctttgagtaatgagacctggtacttgcatcatccattcatcaagtcagcacccggggatgccaggttctgttaggggcgaggggacgtacagcagtagaggagacagctgagatccctgctcagggggattgaggggggctggcatcccagccggggagacagatgaaaaccaagtaaatcagcagaaaagataatttcactcatgataggagctgtgaggggttagagccaaatagaaatacagcgtgagccacgtgtgaggttttcagtttaaattttctaatagccacttaacagtcaaaggaaacaggtggaattaattttaatcttatttaacccaaatatatgcaaagtattatcacttcaacatgtaatcagtataaacggcatcaatatttttgcagtgtttttgcatgaagtctttgaaatcctgtgtgtacgatacatgtgcagcaggtctcattttggactggccccgtttcaagggctcaccaactgaatgcagcttccagactggagagtgcatgtctggagcaagtggggacaaggacagatggagcttcaggaaggcctctctgaagaggtagatagtgagctttgacatggaggccagggaggcactcagcacacagccacatgaggaatgctgcctggagcggccactgcaaaggccctgtggcagggacaggcaaggcacattggacggtcaggtagggccagggtggctggaggggagtgagggcagggacagaggtaggaggtggtgtctgagagtggacagggcgggccacccagggcctcgtggtgcacagtgagcagtttggaactgattctgggagtgacagagccattggaggcttttaaagaggggaatcactaggtcagctgctggctggggaatgggccccgggctgggaggggtggaagcctgggcccagcggggaggccccagtgcgtgaggaagtcgatggcttgaacaggatggggcagctgctatcaggagggaacggaagtggggaagagctccagccctgggcttcagacctccagaagcagcaggaagaggggtgataacagtgtccctccttgcttcggggtcatttatttattcattcatgcattcactgcaaggccctttgcacaggtcaggagatgcagaaatgaccagaacatgagatctgcagcaaagatgggcaaggcaggcctttaggcaagttactacagtcacacgaaggacaggagagctgtgatcacagagctcaaggggcagtggagatgggcgagtggctgccatggcaggggaagggatgctgcccactggcaggtcatcaggaaaggctgtttttggatgcatggaccagaaagccactctctgaggtggcccccacctgcatcatcctagggccacaggccgaggccttctgaggggccttggggctgccccgctgctctgctggtcttggctcctctgcagcacctgcttcctttagcactggtgaatgattcttcctcttcccctgtctcagggaaggcttgcctgcttccatgcttgcatgctgggtgacaataaagcattcctggttcttcaccttggctttcagacctgaaacccgacttcctttcaaaattcctgtcctcggggggaaaaggtttccacaatgtgagatggtagcctggacaccagctgtcatcatgttgctgctctagcgtttgagctcccgatgaacaatgaccattgggtccaaccagcccttttgggagcccccttctctgttactgccccagggggagccagaacccagcagggctgtgactccagcgagcaaaatggaactccctccagtttctagactgaattatgtagggaggacagaaggactcagaacccacactcccagaccatgaataccttcccgtggcagagcatcaccataggtgtccacaagtgacgacgcacagccacatgagggggtccctggggactggctgagggactgggccagaggaggccatgacagcctcatccctctgtctccttctgtctgtctccaaattgtccaccagaatggggacagggaaggagggtcaggaagcacagaaggtctaggctgtggctagggtccctttccctgccgcagcccccaaatcagcatcccaccctcaaatccagtaagaatgctacgatcggcagtgtggctccctccctgcaggtttcattggaggccacgtaagtgaaatttatcccattatgtgtgttttgatgtagcaggaccttaccagttttttttgtttttttatttttattttttttggtttcttttttgagatggagtcttgctgtgttgcccaggctggagtgcagtggcacaatcttggctcactgcaacctccacctcccgggttcaagcgggagcctcagcctcagcctcagcctcagcctcccgagcagctgggattacaggcacctgccaccatgcctggctaatttttgtatattgagtagaggcggggtttcaccatgttggccaggctggtcttgaactcctgacctcatgatctgccgccttggcctcccaaagttctgggattacaggtgtgagccactgtgcctggccggccttatcagtttttatgtaatttgtcctgatttaaaaaaaaaaaatcacatgcgggtaaactcaacatattttaatttctctttagagaaattttccacttgagccaggtatggtggctcttgcctgtaatctgagctactcgggaggttgaggtgggaggatcacttgagcccaggagttggaggctgcagtgagccatgatcgcaccattgcactccagcctggacaacagagtgagatcctgtctcaaaaattaaaaaaagcagtaattttttcttctcaagtcattcttttaaaataaatcaaaagtattttaacagaacaatctgttcctcgttgattttaaacagccccccagctaagtccactggttgtcggtctccatggcccatctccccaccttgcttcctcgctggcttaaattttcaagtggacgagcccttttcagcttggcttgtccacctcccaggtgtgtttcctgaagatgcttgtacttatgtctaagagcggcagctccccacatctcagccacctgcaatcgttgagggttgttggactctaaacttatgtgcctttcctgtttcctctttgccttttgcaaattgaagaaccgtgtaaaaccatttttatgtggcttcaacgtcaactataaattagcttggttatcttctaggagaaatgctatttattttggagtagtagtaaaaagggctcaaaggataaggaggccattcaggcctattctgaatccctgatgacatcagctcccaagggctctgtgctgcaggaagcaaaactgtaggtgggtaccaggtaatgccgtgcgcctccccgccccctcccatatcaagtagaatgctggcggcttaaaacatttggggtcctgctcattccttcagcctcaacttcacctggagtgtctacagactgaagatgcatatttgtgtattttgcttttggagaaactgcccttcctatgttctgagtgaatagcagtttttttgatcccagagggcaacttgtattctgtgggctggtgcctatttgcaaggtcacattagaaagacaggagcaaggcttaggcctgctgcttctggaatctcttgtgcaatagactcccctggggaagtctgctagaaatgcagatccctgggcagccttctagccttctggaataggatcatggtgggaccctggaatctgtattttaatggaccctaatgagattctgatgtagaaacatgtttgagaggcattgatctaaatctgggatgactggccaggtgcggtggctcacacctgtaatccagcactttgggaggccgaagcaggtggatcatttgaggtcaggagttcaagaccagcctggccaacatggtgaaaacctgtctctactaaaaatacaaaaaaaatgagctgggtgtggtggcacacgcttgtaatcccagctactcaggaggctgaggcaggagaatcgcttgaacccgggagatggaggttgcagtgagccaagatcgtgccactgcactccagcctgggtgacagagtgagactccgtctcaaaaaaataaaactaaaataaataaataaataaatacatctgggatgactgaccaagaacaaagaatgtaggcatcaactgaacaccaactgtatacctgggactggatctgagggtaggattgccagattgagcacaaacaaacaaacgaaacacaagaaacaacagaagggtgcctgttaaatatgaatttctggtaagcaataagtaatttttattgtgttcctgtgcaatgataggacgcacgtatcctgaaaacctgtctgtagttcacctgaaattcacatttaactaggcgttctgattttatgtggccgccctatctgctgggaacataggctgatgcccctgggggttctgcgtttccttggccaggttcctgtagggctgaggtcatgggggagccgtggccagggatggtgtccttgccaggggaggtgacgggcagagctgcaggccctacaacttggggttgggcagggatgagtcgctctacggtggtgcctctgataatagctgttattttagtttctgaaaaatgtgctgccctcaagagcttctgaggctaggcctacttgggtgaaaatagctttccagggagccacattgtggggacgtgaggcagcagccccactctttggggccacttggctgtctctaactcatctcacttgccagggctggacaaggagatgaaaaagaaaatgccaaggggtgggcaggcaggagcctgttggcgttggcaggcgctgccagccctgtgtcccagtcaagctctggggcgcccttcctgtccatctgggagtagggggtggagtctgaccatgttggggcggagtgttaatattaggagaggatcctccctgggacagggtccccaggcttgggggcaaggccttctgcctggacccccttcctttcctctctcccaggattcctccaggacaccgtagtgctgtgcacggtttggccccatcggtgtgcctgctccttccagccactgctcccttctgcagaaacttgcctgggattcccagggtgcaggggtgggggctggtcaggggctggtcagggcctggtcagtgtagagcagggagcttttcacttttagcatagatagagtggccagggccccatggctgcacctccctggacataaccaggatgtcctgtcatctgccccccaaacaaaactggggtctcccctttattttgccaacagaatccaatttttaggtgatgagacaagtgtttgacttgaaaagaccctcctgccctgcctcctggaaggtctggagcccagcccagcgccccggatcccctaggcatgtgaaacggggaatgcagtgtcctccagtggctggctgcagcttggggtgggcacctgggtggtggctggtggtccccctgcaggccactgctgccccctcttgggtcctgttctgagtctcaggcctgagtccctggggaaggccccacacctttgccctgtacctgggtatggggatggccctgaggggctgccttgcttgggagaaggggggaaaacagatatttttatataaataagaaaaagacagcccctctgggcagatgaggcctgctgtagggcagggggcttggtaaactgtgtgtccactggtctgtaacccttcagctgggtccttttgtgcagtgaacagcctggacaactgtccaggtggcccttcagggatatgttcctggacctttcttagcttctcaccgatctttcttccacgccaagtccatgttcctcagtcaaacaagtggcaaagaggaggaggaggaggggaaggaggaggaacctgcttcaccctctggcacctgcgggttttgttccacgtgtcttccttgggaaagacaaggggttcttttacagcctaggggtggtttcccctttctacttctgagtgagaccttctcaagtcacggctctttgggcccacatggctaaggtctagccacctgtgggtgtcctgtgctgcctcagtgggtggtgtgggggcggggctgacctcccccgcgcctggctcagtgcagcagaccctggcccctgtgcccgctctctgccctgagcaggagtttgattttcctaccccgtggtgaagcaagcacaggtgggcggaggtgggcagcggtttccagccccagccaccggggcagggaggcctctgttgctcagggcaagggaggcagggggcttagtgggacgaaggctcaccccacactcttatcattagcattatctgtatttttaatttttaagttgagaaattttctacaactgtcaaactagacaaatgacagtatccagttcccctcacccagacgcagccattgctgacagctgtcagtgttgaagatggccagcatctcatgcccttggtttcactcgttccctgggtggccctcgtccccctccccacgtcccgcgccccgcataccctgagcagccatggccaggaacttggcacgtgggtttgttttttctgaatctgcatgtgcgcagccatgagcatgaggtcactttttgaatgtgaccgaagctgcatcctgctgcgtgtattgctgtgtggctggctttcctccctgtcttctgttcaggaatactgttcaggctgaataccgtcctgtgacatgggtttaaaaacacaggccaggcatggtgtctcacgcctggaatcccagcgctttgggaggctgaggtgagaggatcgcctgagcccaggagttcgagaccagcctgggcaacatagacctgatctctacaaaaaattaaaaaatgagccgggcgtggtggtggcacgtgtcattgtcccggccacttgggaggccgaggtgggaggatcacttgagcccaggagttcaaggccgtggtgagccatgatggcaccaccgtactccagcctgggcgacagagagagaccgtctctaaaaaataaaaaataaatcaacacataaacatacgttctcctcctgagggacagagcttgccccggttgttccatgttgactgtgctgcacacaggccgccccccttgctctgcccctcactgtattaagtctctttgggcctcagtttctccatctctaaaggaggtcggggaggccaggcgggtgttgagtgagatgaagaggcccttggagtcattccaggagtctataggtgactccagtctcttctcacttctgacagcctggtggcgggggtggagtctctgctggggatgtgggtacagggctggggtgggcggggatgagggtggggtttggtgacagggcgtgggtggtcacccagctttgcctttctccacagggtcctgaggacaccgtgagccagccaggcctggccgctgggcctgaccggccccccagcccctacaccccgcttctcccggactctcccagcggacagccccccagccccacagcctgagcctcccagctgccatgtgcctgttgcacacctgcacacacgccctggcacacatacacacatgcgtgcaggcttgtgcagacactcagggatggagctgctgctgaagggacttgtagggagaggctcgtcaacaagcactgttctggaaccttctctccacgtggcccacaggcctgaccacaggggctgtgggtcctgcgtccccttcctcgggtgagcctggcctgtcccgttcagccgttgggcccaggcttcctcccctccaaggtgaaacactgcagtcccggtgtggtggctccccatgcaggacgggccaggctgggagtgccgccttcctgtgccaaattcagtggggactcagtgcccaggccctggccacgagctttggccttggtctacctgccaggccaggcaaagcgcctttacacaggcctcggaaaacaatggagtgagcacaagatgccctgtgcagctgcccgagggtctccgcccaccccggccggactttgatccccccgaagtcttcacaggcactgcatcgggttgtctggcgcccttttcctccagcctaaactgacatcatcctatggactgagccggccactctctggccgaagtggccgcaggctgtgcccccgagctgcccccaccccctcacagggtccctcagattataggtgcccaggctgaggtgaagaggcctgggggccctgccttccgggcgctcctggaccctggggcaaacctgtgacccttttctactggaatagaaatgagttttatcatctttgaaaaataattcactcttgaagtaataaacgtttaaaaaaatgggatgcctgcctctgtgacagccttgtttgctgaggtcgtgggggtgggggcctctgggaagttccgggctcctcttctcttggtcaatagctcctttctggtggctgccaagagcgtctctcccagggccgggctgctggcttaccttcctgttgttttcaaatttcaaccttgtgcaatgttgagtttcatagaaatactgcatgagtacgcccttgtttagaagcagcagggtctgagtcccatcccacagcccccagtgcagacgcttttgccacttttgcatggggccccctggatgtgtttctgtgcatttatctacaaatcctggtgcccgtaggacatgccccgtgttgttctagacctttgctttctgcttgttacataaatggtgaagaagagaagcgggtaagagaacagattggagccatctaaaagttctcatcttaagtgtagatcattgcaaaggatggaattttctccgattgtcatcatcgttgatgtttgaatatgagaccatttcatcagtatttaagtgtgcccgctgggatctaactaggagaggagagggtattcactgccaaacatttcaaagaatatacgaacaagctcttttatggtcagaaatgttagcccttttccccccttaaacttgtatttcctttcttcttccctcctaaaattttatctaaatgatatttatatttgatgcttttaagccttttattaatcactcttatacttgcctgcaacataaatatataagttgaagcaaactttttttttttatttcttgtgaccatcaagggtaaatttttttaggtctggggctgccataacaaaataccatcaaggccgggcgtggtggcacacgcctgtaatcccagccctgtgggaggccaagaccggaggattgcttgatgccaggagttcaagactagtctgggtaatatggtgagaccctcatctctacaaaaaaaatacaaaaattagccaggcgtggtggtgggcgcctgtggtcccaactactcaggaggctgaggtaggattgctggaagccaagaggttgaggctgcagtgagctgtgatcatgccactgcactccagcctgcgagacagagtgagacactgtctcaaaaagaaaaaataccatcaataggtggcttaaaccatttatttctcacagctctggaggctggaagtctgagaccagggttccagcagggttgggttctggtgaggcgtctcttcctggcttcagacggccgccttctctgtgtcctcacatggcctttcctcggtgtgaaagggggaagagagagggagagcgagagctctgtggtgtctcttataaggacactgatgctatcagatcagggcctcatttaattattttcttagaggccccatctccagacacagccacactggaggttagggcttcaacaggaattttgggtcaacacaaacatttagcctataccatctggattgcctttcaagtctcaggacacaattggtcaaaactatatcactatgttttatgtgacatatcaaagtagcaaaattttattggaatgcatgtccttttggtatgcattttatatatctttttcatttacagattagagttgtgtgtgagtgtgtgtacaattccatgaattttgacatgtttatagagttgagtcattacccctacaatcaagacaaaacaatttcatcatcccccaagatttcctcatgtcttccctttgtttttgtttgttttacagtgggctcccataatttttttttttttttttttgagacagagtctcgctctgttgcccaggctagagtgcagtggttcaatcttgactcactgcagccttcacctcccaggctcaggagagcctcctgacttagccttctgagtagctgggaccacagatgtgtgccaccacacctggctaattttttttttgtagagatgggggtctggctctgttgcccaggctggtctcaaacttttggcttcaagcattagtcccacctcaacctaccaaagtgctgggattagaggcgtgagccactgcacccagcctgcgacctgtgctgccttcctcccactttgtagggaagtccctcatccccatgcttagcccttggccactagctatttttaccttttccagaatgttctaaatgggatctacagcctgtaaccctctgagcctggcttccttcactcagcactgtctctagatgcatgcctgttgttgtgtgtagcaatagttcctttcttttcaccgctgagcagaactccatggggtgcacacaccagtgcttttcagccgttcacttattgagggacacgtagagtggttgcagcctttggcaattgcattagttggttttcacgccactgataaagacatacccaagactgggtaacttttaaagaaaaaaggtttcatgaactcacagttcatatggctggggaggcctcacaatcatggtggaaggcaaaggagaagcaaagtcatgtcttacatgggaccagagaagagagaatgagagccaagtgaaaggggaaacccccgatcaaaccatcagatcttgtgagacttactcaccaccaggagaacagtatggggttaaccgcccgtatgattcaatgatctcccactggctccctcccacaacatgggaattatgggaactacaattcgagatgagatttgggcagggacgcagccaaaccacatcagcaactatgaacaaagctgctgtgaacgttcatgtacagatttgtgtgtgaaggcgtacgttcatttccctggggtgtatacctcggagtggagctgctgagtcaaactggagctctgcgtttcacttttgggggactgccagtttcacagtcgctgtaccaggctgcattcccatcagctctgcgtcctcaccagcatcttggtgttttcagttttaaaaaacttcagcccttcgtagtggtttctcattgtggcttttatttgcttagaaatacttcttgtcctgagatgagtgggacttcctctccacccccaattaattcatgtatccgtgaatgactgtcacgtattgctagaatgaaaccaatttttaccatcaattctttgtccctgcaagtgcagagaagccttgttttcataaggaagtcactgggagtggaattcttatactccttctgggtagtatgcgaatgtcacacggcgatctgtcattggaagcgattctcactgatctcccagcagacaggtccgtttgacctttcttcaaatttgtagaaagcagcaaagtggaaaccaccggcttgcaaaagcatttcttacccaatctttagatgggttctcgaaacctgtgtccgggaagttccctctgattggggctggaggtcagggaggctttgcccgttggctgtagagtggaggggtggggggtcttgtgacctgcccggggaaatggcaggcgagtgacaagctcaggagagagtccaggccccgaggatggttcccttcaaactccccatgtctgatcctctgggaagctgaggccagctttggttatttgatagccacggtgaggattttgacttaatctgtgtatgcaacacatcacagacagttttaactcttgcattcaagtctacctgctcataaaacagaaaaaaagacaggccccagaaggcattcggtttttttttttttttttttttttttttggagacagggtctcactttgtcacctaggctggcacaatcactgctcactgcagcctcaacctcccaggctcaggcgatcctctcacctcagccagcctcccaagtaggtgggattataggcctgtgccactacacccggctaattttttgtatatttttgtaaagatggggtttcgccgtgtcgcccaggctgatctccaactcccaggctcaagcgatccgcccgcctcggcctcccaaagtgctgggataacaggcatgagccactgccctggcccttaagtcattcttgtgtttgtgtgtgtgtggggtgtgtgtgtgtgtgtgtgtgtgtgtgtgtgtgtgtgttcccgagggacttagcctcccgtgtgtctcattgggtgaacatcttgcttctgagtgaggtttgatttttttgtagggtgtgcgtttggacacatccttggtcttaagcccagccaacgaccttagccagggctcagggagggaagcaccgcctgccccacagctggagggctggggttcgggacacccggtcgagcttcagtgtctctgattctgagcatctttgactctgcgagactttcttctcatgccttcacttcaggcgccagcccctgccaacgatgggactccactacttaccatgttgatttaatttggcttactttttttcttaaagaattttattttaaaaggaaggcagtcatatctgtgaaattatgggtcctttgggcaagtaatagttttccagtcgccattaaaataaatacctaactattaaggacgttcctcccagtacctcgaagcagcctgctacctgcaatctctgcaccatcccatgattgtgtcccatgcacccttcttcctgctcggcctgcatcgcccctgcgtggccttttcccccctctctgcctctctcagtcttcgccatcatcaaaggcgcaattccagccatgccctctcctccaggaagcacccctcccccatcactcctgcttgctgttcttccctgtctcaggactcctggggcactttgtatctcagttgatactagaatgttctagaataccagaagtcctgacaccagttgctgtaaccccaaactccaaggacctgcagcataaaccccggtacatgcccttgtgctggaaacgaatatttttggccggggcggttactcacattccttagtactccttggctcacgcggacacccattctttcaacacatacttatccagtgctcactacgcgctaggcacagggggtgcaattgtggaccagacagaggcggcccttcctctcaaacaactttacagttctgccacttactagctgtgggaccctggacaagtcacacagcctctctggagacctactgttctctcctttaaagcaggtgactcagatctgctttgcagggacgtctcctgctttgcagcgatgtcacccaggagagatgggtgaagtggatagtgaatggagtgggccagggcggtggtcctcggctgaaaacaatgcctctcggggtcagcgtggggctcaagaggtggcggccccgtgggtgggtccagggccagggaccctgtgtccgagcccctgccctggagccatcctgtctcacctgaaggctctgccagtctggtccactggcctcccggctcccacgcgtgtcccgagccgtccattctccaggtagcggccctgaaatgttaatctgtcacaagggtcatctttgcttgaattgtgggtgacttttccccatcctgggggtaaagtccccccgacttgtctctccatccgcgatcccctgcaatctggctgcagcacgcgagacttcaggacgattccgagctcggccactggggggcgagctgtgcacacaggtggtccagaggctgctgcctgggaggggctgcggatcacccggttcctggagcggagtggattgattttaaactggggaagctgtggtccacagcctggcttcggaaacccgtgacccctagaaattgtattttacgtgtgtgtctgggcgttttattctgggaagcatttcctcaagtcttcagattttcaaaggggtcttaaccctttctctctggggccttgggaacaagagtgacaaccctataacagggcgaccagggtcacacgatgtctgctcctccttagcgtgctactcccagtacctgcgtgctactcccagtacctgcgtgctactcccagtacctgcgtgctactccctgctctgctcaagttgctgggtggccttggagcaattcataacctctctgagactgccgtgaggtgggagtgaagattgctgtgtacgaatctttgagaacccctgtaagggtggaatcgaaatggacgtgtgagggctgggcgcgggggctcacgcctataatcccagcactgtgggaggccaggggttcgagaccagcctgggcagtatggtgaaacaccgtctctactgaaaatacaaaaattagctgggtgtagtggcgggcacctgtaatcccagctagacgggaggatgaggcacgagaatcgtttgaacccaggaggtggaggttgtagtgagccgagatcatcccactgcactccagcctgggtgacagagtgagactccatctcaaagaaaagaaaagaaaagaaaagaaaagaaaagaaaagaaaagaaaagaaatggatgtgtgagcattctgtacacagcctgggacgattatgaaagctctcaaatgctgagcctccagcaaacatttatcacacacctactgtgtgcagagcacttgctgggctctgagagggagtcaagctctgagaagtctgtgtcgatttgttcattccttcattcagcaaatgctgtttgggtgctcactgtgtgtcacacaccctcatatttattgcgaatcggcttgggttaggttccccagaagcagacactgagaccaagattcctggccagggagtgtcccaggagggcaaaggggactctagcagcccagggtcacggacagctctcaaaggcagaccaacaggtcttgggttttggatacaaaaatgctccaaaatcaggggtgtgcaaatacagtaaaaagaggattcatttggatctgcttagaacaccaagggtatccgcttcagaaatacagaggtgaccgggtgcagtggctcacccttgggaggccgaggtgggcggattgcttgaggtcaggagtttgagaccagcctgggcaacatagtgaaaccccatctctactaaaaatacaaaaattagccaggtgtggtggcacacgcctgtaatcccagctgtgggaggctgagccacaagaatcggttgaacctggaagcagaggttgcagtgagccgagatctcaccactgcactctagcctgggcgacagagtgagactccatctcaaaaaaaaaaaaaaaaaaaagaagagaaaagaaaagaaaaacaacaacaacaaagctggacgaagctagaaagctccctgccctcacaaacttgccttctagtgggagagacagctggcgagtaaatgcatgagtaaggtcacgtatgagtaaggtcactcataagtaaggtcacacatgagtaaggtcactctgggaagcaacgatgccaggatagaaagaagagcagggggtgcaccggagaagaggtgctgggcaggggggctgcttagatgagagcacatttccggaagtttcctctgagaagtgccaactcctgaaggcttcatgggaatctggagaagagcactccaggaaccgggaagtacatgtgcaaagggcctggggtagcaacacgcagaacagaaacggtgcgctgtggctggagcccagagagtgggactgagtgggagaaacgcaaactgcttttcctcctctgttcaccccacaacaatcaacacagaagacttctgtgaccaaatatggggggctccccccacagcagatcaaatgaacacctaattctgcagcggatgccagctgggggccctctgattcaactcaattctgccgctgtctacctggaggcagtgtcagaccccacaggtcgagggttcagaccccagggcggccccttactcccgatgcccctctcaagccctgggatgtgtcacctgtgcttctcacagaccagctgtgaattggggttcccacgaccctgtctttgggttcaattaatttgttagaacggctcacagggctcagggaagcactgagcttatttattataaaggatgttagaaggatacagatgaagagatgctagggagaggcatgggggaggggcacggggaaagggcatggggaaggggcatggagctgccatgctctccaggacaccaccctccaggagccttcccatgctcaaaaactctgtcctcttgagtttttatggaggcttcattaggtgggcgtaatttttaaaattatatcattttaaatttttaaatgtttaatttttgtaggttcatagtaagtgtatacagttgtggggtgcatgagatgtgttgacacaggcatgcaatgtgacgtaatcacatcatgggaagggcgtatccaccccttcaagcatttagcctttgtgttacaaacaatccagttacactccttcagttatttaaaaatatacaatcaagttattcttgactatagtcaccctgttgtgggatcaaatagtaggtcttattcattctttctctatatgtatatggtttttgtatacatgggcatgattgattaaaccacaggccattggtgatcagtttgaccttcagcctctctcccctcactgctggaggttggggactgggctgaaagtcccagtcctgtagcgctgacttggtttttcctgagaccagtccccatcctgaagctgcctaggggctgctggccaccagtgagtcattggcaaactaaacactttggagattccaaggattttaaggcagaagaccaaataaatattttacacgatcacagtgggagggggttggagggagatggaggtggagagctggggggcctcgcagttaggattttaagtacagtgggaaaccactggagatttttccatcagggagggctgcgtttgctgtttctgctgtgggagaggctgcgggggcaggcgtggatgctggaggtctggctggaggcagtggccctcctcctggtgacagatggtggtggtggtggtggtggtggcctgggccagggcggagcagtggatgaagaagggacagatgcggggtgtatttttaggggctggagctcatagaacatggtgctaaactggatgtgggaagggaggggtgaggacgcgtccagtgagactctcaagtgtctgagcctgacggccagggggagggaggggctgctttttgtttgttagttttcatttgtttttgtttgcttgtttgttgtttgttttcttttttgagacagagtctcgctctgtcgcccaggctggagtgcagtggtgcaatctctacttactgcaacttccacctcctgggttcaagcgattctcctgtctcagcctcacaagtagctgggatcacaggcgcccgccatcatgcatggctgatttttgtatttttagtagagacgggatttcaccatgttggccaggctggtctcgaactcctgaccttgtgatctgcctgcctcggcctctcaaagtgttgggattacaggcatgagccaccgcgccaggccattttcatttgtttttgagacagggtctctgtcacccaggcttgagtgcagtcgtgcgatcatagctcactgcagcctcgacctcctgggctcaagtaatcctcctgcctcagcctcccgagtagctgggtctacaggcacatgccaggacacctggctaatttttaaattattattattattattattattattattattttagaaagagagtcacactatgttgcccagggtggtctcgaactcctggcctcaagcgatcggcccacctctgcctcccaaagtgctgagattacaagtgtgagccagagggaggtgccactaactgaggagggaggcaggaaggtggggctgggagcaagtagggccccgatcccccagtgcagacccgggcttagctcagcatggattgaatggctgtgaactccctgtgggggctgcagagggaggagtcaggacactgaggttgttgtgtcacccacaccggattcatcccctatcccggtccacccacccccagggcatctggaatgtgagaggccagagagagaaagcaccaccaggaatcccaacgtagcaacagcacaaataacagcagccccttttgatgctcaggggagcacatgtttcatggagctatccagtgacctgtacagcagggagacttgaggggaccatttcacagatgggaagacggaggctgaggggtgaggctatatttgcaaggtggatcttttttgtgtgtgtgagcaattggtcgcgctgtctccctctttagactttacgctgctgaaggcaggcaccgagttctgtggggttcgtggtccatgggcatgcatgcaaatcagtctttgctgagttaatgaataaatgatctggggtgtagcgaggctggggatgtggttgcgggaggggagttctgca

SEQ ID NO: 567 - DNA, 3144 bp, Homo sapiens
gctcaggccccgcccctgccgccggaatcctgaagcccaaggctgcccgggggcggtccggcggcgccggcgatggggcataaaaccactggccacctgccgggctgctcctgcgtgcgctgccgtcccggatccaccgtgcctctgcggcctgcgtgcccggagtccccgcctgtgtcgtctctgtcgccgtccccgtctcctgccaggcgcggagccctgcgagccgcgggtgggccccaggcgcgcagacatgggctgctccgccaaagcgcgctgggctgccggggcgctgggcgtcgcggggctactgtgcgctgtgctgggcgctgtcatgatcgtgatggtgccgtcgctcatcaagcagcaggtccttaagaacgtgcgcatcgaccccagtagcctgtccttcaacatgtggaaggagatccctatccccttctatctctccgtctacttctttgacgtcatgaaccccagcgagatcctgaagggcgagaagccgcaggtgcgggagcgcgggccctacgtgtacagggagttcaggcacaaaagcaacatcaccttcaacaacaacgacaccgtgtccttcctcgagtaccgcaccttccagttccagccctccaagtcccacggctcggagagcgactacatcgtcatgcccaacatcctggtcttgggtgcggcggtgatgatggagaataagcccatgaccctgaagctcatcatgaccttggcattcaccaccctcggcgaacgtgccttcatgaaccgcactgtgggtgagatcatgtggggctacaaggacccccttgtgaatctcatcaacaagtactttccaggcatgttccccttcaaggacaagttcggattatttgctgagctcaacaactccgactctgggctcttcacggtgttcacgggggtccagaacatcagcaggatccacctcgtggacaagtggaacgggctgagcaaggttgacttctggcattccgatcagtgcaacatgatcaatggaacttctgggcaaatgtggccgcccttcatgactcctgagtcctcgctggagttctacagcccggaggcctgccgatccatgaagctaatgtacaaggagtcaggggtgtttgaaggcatccccacctatcgcttcgtggctcccaaaaccctgtttgccaacgggtccatctacccacccaacgaaggcttctgcccgtgcctggagtctggaattcagaacgtcagcacctgcaggttcagtgcccccttgtttctctcccatcctcacttcctcaacgccgacccggttctggcagaagcggtgactggcctgcaccctaaccaggaggcacactccttgttcctggacatccacccggtcacgggaatccccatgaactgctctgtgaaactgcagctgagcctctacatgaaatctgtcgcaggcattggacaaactgggaagattgagcctgtggtcctgccgctgctctggtttgcagagagcggggccatggagggggagactcttcacacattctacactcagctggtgttgatgcccaaggtgatgcactatgcccagtacgtcctcctggcgctgggctgcgtcctgctgctggtccctgtcatctgccaaatccggagccaagagaaatgctatttattttggagtagtagtaaaaagggctcaaaggataaggaggccattcaggcctattctgaatccctgatgacatcagctcccaagggctctgtgctgcaggaagcaaaactggtcctgaggacaccgtgagccagccaggcctggccgctgggcctgaccggccccccagcccctacaccccgcttctcccggactctcccagcggacagccccccagccccacagcctgagcctcccagctgccatgtgcctgttgcacacctgcacacacgccctggcacacatacacacatgcgtgcaggcttgtgcagacactcagggatggagctgctgctgaagggacttgtagggagaggctcgtcaacaagcactgttctggaaccttctctccacgtggcccacaggcctgaccacaggggctgtgggtcctgcgtccccttcctcgggtgagcctggcctgtcccgttcagccgttgggcccaggcttcctcccctccaaggtgaaacactgcagtcccggtgtggtggctccccatgcaggacgggccaggctgggagtgccgccttcctgtgccaaattcagtggggactcagtgcccaggccctggccacgagctttggccttggtctacctgccaggccaggcaaagcgcctttacacaggcctcggaaaacaatggagtgagcacaagatgccctgtgcagctgcccgagggtctccgcccaccccggccggactttgatccccccgaagtcttcacaggcactgcatcgggttgtctggcgcccttttcctccagcctaaactgacatcatcctatggactgagccggccactctctggccgaagtggccgcaggctgtgcccccgagctgcccccaccccctcacagggtccctcagattataggtgcccaggctgaggtgaagaggcctgggggccctgccttccgggcgctcctggaccctggggcaaacctgtgacccttttctactggaatagaaatgagttttatcatctttgaaaaataattcactcttgaagtaataaacgtttaaaaaaatgggatgcctgcctctgtgacagccttgtttgctgaggtcgtgggggtgggggcctctgggaagttccgggctcctcttctcttggtcaatagctcctttctggtggctgccaagagcgtctctcccagggccgggctgctggcttaccttcctgttgttttcaaatttcaaccttgtgcaatgttgagtttcatagaaatactgcatgagtacgcccttgtttagaagcagcagggtctgagtcccatcccacagcccccagtgcagacgcttttgccacttttgcatggggccccctggatgtgtttctgtgcatttatctacaaatcctggtgcccgtaggacatgccccgtgttgttctagacctttgctttctgcttgttacataaatggtgaagaagagaagcgg

SEQ ID NO: 568 - protein, 458 aa, Homo sapiens
MWKEIPIPFYLSVYFFDVMNPSEILKGEKPQVRERGPYVYREFRHKSNITFNNNDTVSFLEYRTFQFQPSKSHGSESDYIVMPNILVLGAAVMMENKPMTLKLIMTLAFTTLGERAFMNRTVGEIMWGYKDPLVNLINKYFPGMFPFKDKFGLFAELNNSDSGLFTVFTGVQNISRIHLVDKWNGLSKVDFWHSDQCNMINGTSGQMWPPFMTPESSLEFYSPEACRSMKLMYKESGVFEGIPYFVAPKTLFANGSIYPPNEGFCPCLESGIQNVSTCRFSAPLFLSHPHFLNADPVLAEAVTGLHPNQEAHSLFLDIHPVTGIPMNCSVKLQLSLYMKSVAGIGQTGKIEPVVLPLLWFAESGAMEGETLHTFYTQLVLMPKVMHYAQYVLLALGCVLLLVPVICQIRSQEKCYLFWSSSKKGSKDKEAIQAYSESLMTSAPKGSVLQEAKLVLRTP

SEQ ID NO: 569 - DNA, 46067 bp, Mus musculus
  misc_feature (1)...(46067): n = A,T,C or G
acgggcaactttcctcgtgcacagtccaacctaagacacggggcccggtggtgatagggataccctatgacgggtaaggctgtgacattagaggaacgacctaaaacaggagccacggcagatggacataattgcacaggcctagtccagcctcattttattaaaacaaaaagggggagctgtgggaagccacatgtgccgttgcagagtggcactgactactgctggccaccacgcataagtttggacaaacaatcaatgtgtacatatgcagtaaagttttttgcaaagacactgcctggcccaggcatgataataaggctttgagagtattaccaatcagatgtaagacatgcaaatgaggtatgataatgaggctctgtgaggtacagagagagagagtaccaatcagatgaggaacatgtaaatgagctgtagtgcataaccaatccgggtgtgagacacacctctcctaggcctatataagcagcaccagttctgggctcgggggtctcttcacctctgcaatcaagctctcccaataaacgtgtgcagaaggatcctgttgcagcgtcgttactgctggccagtccagcgcgcgcaagacataatgtatatatacacaataaataaatctttaaaaagaaagaaagagagagagagagagagagagagagggagggagggagggagagacagagataaagaaagaaagaaagaaagaaagaaagaaagaaagaaagaaaggaagaaagagaaaagcacaaaagaacagcaaagggctggagagatggctcagtggttatcagcactgactgctcttccacaggtcctgagttcaattcccagcaactacacagtggctcacaaccatctgtaatgagatctgatgccctcttctgatgtgtctgaagacagcgacaatgtactcatatacataaaataaataaatcttttttttttttaaagagcagcaagtttcgagcccagactgctgtcctaatgacgccaactgatattccccagagggagatgggcactaggtcccctggattatctgtctcctgtcatgaggtgactacacacaggaacgattccagaaccagtcctcttccttcttcctcagccaactgcaccttcagaacttgaggattctctgctttaacggacttcaaaagttacagggtctgggctagttttatgtcacctccacacaagtcagagccgagaaaagaaactctcaatgagaaatgcctccatgagactggcctgtaggcaagtctgtggtgattgacaggggaaggcccggcccactgtggtcagtgccatccctgggcaggtggtcctgagctgagtaagaaagcaggctgaaaaaaccacagggagcaagcgtttctccacagcctttgtacaagttgctgctccagcttcgtgccctgtgttcctgacctgcaaattctgtaactccaggctattggcaaaaggaacaactaccagctagcaatgaaaacgacctgtggtctgtaccacaccgtgaatgaaatgcagacgtgatgggtgaaatagaccaaactcaggtgagctcccatggcagggtttcacttgtaatgatggtcaaagacaggcaaaagtgacagttgtcaaggagaccagaacatagaatgtcctgtaatgtggcagtgtagatggcggcgccctgggcacacatgcccactgctggcatgtcgtagttccctacattctgttgctttgtcatcttaggcaaaccattccactttcccaggctttgcttcccgctgacagggctgaatctaacagcatttgccctgcagaactgagggagggagggaggggtatgcttcgtgcaatacagatgtgtgcaggcccgaggcctgacagtcagcttccccacacctcctgtctgacatggtaatttaagacacccaccagaagccaaaggccaaccctgagcaacagccccacccaaccccccagaaaaactgagagaaacaagaagaatacaaatcagactcttgcttttcagatgggctgtcaaaattacatctcctatagactgactggaaatgtctgctcatcccctatgagccttcattaagacaaataccacaattaaattctgagtctcaatctgagctgtacccaagtcacacgccaataacctcagtgtacacacccaccagacattctcttgatactcacagacatcatgagctccgccagaaccaatgtccacgggcctgggtgtttctggtctgagaacctctggcttgagccgagcaggccagagctcttctggccccagcaccactggggtgaggtttcccacggcaggctgtgacgggtccagcttcactactctctgctcctttgctgtgagtcccattggtcccaggaccacaggcaccaggtggtctaggggtttaacagcctctggatcctgcttggctgcttgccgaccgctttgcaagagtgaagccagggtgccttggcctgtgtcctctaagcaggagatgaagagaggaagggcctgcctccctcgggtctcaaggtctgtgaccagctgcctggcctgatcccgccgagacccagatcctgcctgctgtttggatagaaaaccagacactcattatccagggacttccatgtggcccttaacctacttcccatttctcacctagcctctgcctcctgagtcctggcttccaggtgtgtgtcaccacccctggaacaagcaacagtctgtcactgccaacactaggttggaaactgctctgaccacacttagctgaaggaaatcagaggctgctggcgcctccctgggcagttcagcttctgatcccccttaatatgcctgtggtaggtgggcagaacctaatccagcagtgccctgagttcatgtccctctgcaaagcagaaagatacctactgtgggtgtccagtgctgtgctaagtgctaattagccctactaaaagtagcaaaaacagtggtcagtagtttacacaaggtacttaaatttttctcagtttgtttctagcattaaaataagagaactggatatagaaatcaagatctccagcatttttgtttttgagaaaagttaagtttctcttttgtatgaggggaaagctttcatatttgggggggggggggcgcaggaattctcaagtagccaagactggccttcaacttcctacatagcagaggatgacctttgaacttctgactctcctgcctccagagtcaccaggcttggtttatgttggggattggactcagagattcatgcatgctagacaagcactgtaccaaacaagctatacatcaggcttcgtgttctgattttgcttttaagtatttaagtatgcatgtatgtatgtatgtatgtgtgtatatgtatgtacgtgtgtatgtatctttctatctgagtctgtatgtggcaactgtgtgtgcatggtaccagtggaggccagaaaagggtgtcagaacacctggaactggagtcaatagttgtgagttaccacatgggttctgaaaactgaaatcaatgctcttatccacagaggcagctctcagtccttagttttggcttctgaagactccatctcaggtagccaggctggcctcaaactctgcatgtagccaaggatgccctgggaacacctgatcctcctgcctctacctcctgagtgcttggattccagatgtatgccggcacccctggatcaaactgctcctttcaaacaatctgccactgccaacacaagggcagaactgttttgaccacacttggctggagaagggagcaagacagtggctgctggtgccactctgggcagttcagctcctgatcccccttaatatgccttctggaaggctaggactttcccttcaaaccacttttcttgatcagtatgggcccatccaaatgtgttcctgagcctacttttgttattatttggcagctaaccacatgactctacaccactttcttctatctccttcactggaccaagccacgttccaatacagatgctggagacagccttgtagacagtcccccagggcctggcactcatatcctctcagaaagaaatattcccttttcagacctgtggtgaggcatcaactggaacaaagatgctaaagtggttttttttttctctttttagagtcctttaagagtttttactctgtatcttccaatagaagatgcatttatgcatacagctatcctgttttctctgtaattttcatactcatctttagactttgaacaagttgaccttttcccttgtgtaatacagaattttatcaagctaaaattgaactctagtacaatgaaaataatactgccaccattatattttgatccagaataattccactcacacagtaatccatatagcgtagaaattcaatacacccctttacacaagccatcaacattgtgactcatgctctaggtttaagtgggcgaaagtggattaaaaaaaatcaaatgtttgattttattcttctgcattacctgcatcaaattccttcttttctgaactcctttataaaacatgcacttgataaaagcccagccaaaaaagacagatcctgattctatgtccttgtcctaggacaggatgaccaccgttccatttcacagccctagaaactgagattcaaaaacgggaagtgactggtacaatgtgccagtataaggctaaagtgggtgtctagggcccttatactagagaagagaaaaatcataaaagttcaaacggtgcagattacagaccgcttttaacaaacactccacaaaagaggagcatgggttcttctattttattcttgtggcgaactaagagggcagtactggggaaggttttaaaaatggagttcccacaccatggtttcccagggcgtggattgcacagggtgcaaagcggaaaaaaagggcaggagctccgtagtggcttcagagaacctctcagcgacctcccagtccctatctgcgccgcgggaaaaagagggcggacacaaggaggcggggcgcacctgaatatcctcgatcatgtcgcgcgtgaagagctctcgactcagcagagcgtcccagagctccgcgacttgcagctcgctcactaggcgcaccctgcatcgccgcaggagctgccggtccgcctcgtccatggcgagccgattgcgggaccccgggttctgtccgcttccggccctcgggttccgccccggcgcccacgccccgcccccacatagcgcctccagggatcccgctccggccagcggtcacccggtccactgggctccgctccgccccgccccgccccgccccgcggcctgtgactcgcgctcactgggctccacctccgcaatcaaaacagctcccacggccgctcaccccaccaccagcccccaacacctccctcaacgccgcgctctcaggccccgccccttcgccacgccctacgaccgcgctgcttcgccacgcccactggcgctgcattcaagctccgccccatcacttcgccgtacggactaagacctgcctcacatgataacgcttctcccctaggactcgcccctcctcgcctcgtagaccagcaatcccgccctaccgagttccttcgccccgccccgaagccctcctttgcatcccagactctcccctagggttccaggccttgtggttgccttgctatcttgctcccatttgctggttctgcttagcggtagttgtaacttttcccctcgcatggcgattgctctaccaaaattcacaatgaccctacttctacagatactcaaaggatcacgagagaaaagggaagaaaaccacgcctagacatttgtcctagatctttcaagtcccttgctggctgtggctttctaacgctgcggctagtaaacctcttgctgcctgctgtttcagggctatcgtgccctcaatctaaccaagctcattggttagatctcgctctctttccctcctcagcacctcccccagagaaactgccaggaatctaatcctatgttctctcagttttgtaccacttatttccacgacttaaaaagtaattgaaataactggagagatggctcagcggttaagaacaccaactgctattctgaaggtcatgagttcaaatcccagcaaccacatggtggttcaacaaccatctgtattgagaaatgacaccctcttctgatgtctgaagacagctacagtgtacttacatgtaataaataaataaatctttaaaaaaagtaattgaacaaggtctgaagagatggatggttcagggtaaagaggaccagctgttcttccagaggtcctgagttcaaatcccagccaccacatggtggtttacaaccatctgtaatgggatctgattccctctgtgcatgaagacagagtgctcatatatgcattaactaaataaacacatttttaaaaaagtaattgggcattgtgctagccccttacgctattctctctgctagccttatgccacattcctgacagggatatagttattccttgatgacagctgtagacatgtgtcagggatctcacagcgtgaccagaaccggaatagactcttagccaagaatccaccttggaatatgtcaaacgataatattacacttgtttcctgatttgggcatcagtcaacatttccttccataaaataggatgtacactcgggaggagcagctgaggtgaatttacaaacaggaaatctggggagagcagtaaggagaaactcaaagggggttagttgccccaaagtaaaggagattcaccacgttggctaaaactggcttgtttggggatttggcagttatccctgccacctgatttctcagactgttaaataacctagtttcagcttggtaaaaataaacatgagtgagtgcaaattggtctgctggtgccagtgcagaaaatcaatccaaaacacaggtatagtataggtcactcgagcagcaaagccttaggcacagaccaatattcagctctgcgacagcgcattcgcctagcatgcacgagaggcggggggggggggggggatgacgatgataggctttagcttcattttttatttattttgcaactaactattcaaatatttactggcagcttgtacaaaccaaggtctgtgcagacagtgatacaatgctgaacaagaaaagtgtgagactctacctgcaggagcttacctgaaagagctctacctgaaagagcccaaagaacaacgatatacactaaatgtatagaagagagagccaggcatggtagtgcagacttttaatcccggcactctttgaggaggcagaggcaggcagatctcctgagtttgagaccaccctgattcacctagtaagttccaggccagcgaggattacacggtgagaccctgtctcaaaagcaaacaacaaaaacagcatgctaggtaagtgttttagaaaccgattacataagaactcactcaacacgaggcatggaatagaaaatacatcaagagcccttggtcacgggcgcaaaaaaaaaaaaaaaaaatgtcagccttattcaccacgccctcttccctcggttcttttgtttgtttgtttgtttgtttgtttgcttgtttgtttgttttttcaagacagggtttctctgtacagtcctggctgtcctggaactcactttgtagaccaggctggcctcgaactcaaatatccacctgcctctgcctcccaagtgctgggattaaaggcgtgcgcaaccacgcccgtctttccctcagttcttgtccaaattccagtctagaacatccttgggttgatgtactgaatttggagccttggattctaagcttcgggcaagtctttggccctctccgaacttcagtatatgaagaggttgaactaggaagaatccctaaggtcgcctcaaacgctgacgctctaggattctatgaatagggtcaaagtgaactgggaccagcgactgcgtccccgtcctagcaacagttgctagatgtgggccatcttctggcaaccagtggaaacccctccccggttccgggaggtcttcctggtatcccgtgatgcatagcgactccgcctcgctagaaggcacgttctggcctcgctagtcaagagcaagctttcagacccagccagagagcgctctccgttcctatagcaactgcgccagatccaggtgcctacggtgaccgtcaaggccaaaataggttcatcgcgtgtgcggcctaaaccggtctgtgcgcgcgtcgcaggcgtggggtctttaagtgacacgtgactgccccgggcctgggccccgcctccttcccctccccaggttctctggtgtggactggaagcgccggccccggcggattcactggagcacggacgctgcggccggttgggccggtgccctttcccggtaactccttcccggcttgacgcgcgagcgtggcggggccttgcaagctgggggatctcccgtcagatcctccgcgtcctcagcccgcgctgggccccggggggccccgggagccgacaggaaccggggcggcgggggagggggccgcctcccggaaggtcgtaacccgggcgggcgcccgagtcgggacttggtcctgcggagcgtctggggagcctccgccgcctgcgcttggggacgccgagggctacctgttggccagcgcgtccccaatcctgtggccggccccctggagctggagaacgtcagccaaaaattgtccccacctcacccactcccgcagcagacacttcacccaccctgcctgtggattctgcttagtaaaccccttacccactttactgtaccccatccccataaagatcctgctaggtgctggtgttcagtcacaccctatcagcaagaacacaggtttaggtcctagaatggtggtggacagcccccccacccccgcaatctgatccccaatctgggtgagtttagccagtacctcagaacaggctgtcttaaaagagaaacaggaactggcttgcttgtggattttacttagcatgtgtgcagttctaaacagtggtcaactgtttataaagactcccaagcagggtttatggcttgcacttgtcaaaatccaccccccctgagtaaggtgtcagccactgaaccttactaaacactgtgaggtcaagataaatggacccatgaaaccagcatatggtataaaagatcacagccccctgtgtgagtgtgtgtatctccaggtccacgctatctccttatcaaccagccaggattattccaaaacccacactgagttctacccctcagctgagttgtagtttaaaacattttaaagccgtgcctattcttctagtctttcctgttctctttagataagaaactggattcttaataatagcagacttctgaatattaatgcacagttattttaaggtgttttactttcatgtctatttagtgtccagaaatgccacaatgatcctagaatgtaatttagtacatgagaaatcatgatgagtttgtgagctaatttgacccgttctcagctactctgaagccaattattttaagtttattgttatgatagatgaaatggtgcatttgagatatcctctcctggatatcctagatatattctcagagtcaccacttgtttcagagcattcatttccagtaattttaaaaggacttttctaatctattaatctattatgacttgtctttttttttttaattcataatagttcttgtgtgtgatattcaaaaatagtggtcttttttgttttaaagatagggtcaactagattgacacattccctcttaaaaaaaaaaaatctcgtgtttagctctcatttgaacatctttattccctaccttaagaagcatgaccattcaagttcctgtctcttgaacttaaaactacctcttgatcatttcagctctgggaaggaagagagatggaattgaaaaggttgggcgtgtcctggcgattcttgatggttctggttctgatcctgcaaagcctgtctgcattggattttgacccatacagagtcctaggggtcagccgcacggccagtcaggctgacattaaaaaggcatataagaagctcgctcgggaatggtaggtgaacccaagaacggaagtttaacgtccgctaggcagtcagcaggtggctgaagcctcaatgagggtgacttgtctgtctctgcgttgagtgtatttgtagaaccgcctagagtattgaggctagagcaaatacggaagcaaggcggtgagcgacgctcctgtgctatgtagaggatttctggtccttaaacatatttttcctttgtgtgtgagggagttcgtgtttgtatgttggggcagggggagggtttctctgggtagctctggctgttctggaactcactttgtatgtagaccagactgactttgaactcagagatttgcccatctctgcctcccaagtgctaagattaaaggcgtgtgcgtcaccacccagctcttttgacttgggtttttggttcttttggtaatactttatttttaatgatgtgtatatctcaaaggagactgctgaacacactggagatggagttacagggagtcgggaattgcttgatgtgggtactggaaccaaaccttggtcctctggaagaacagcaagtgctctcttaaccaccgagccatctctccagcccctagaaagcaattctttatgagtataaatgctacagggaacatagagttttattctctaagtctctaagcttttaaaatgtttagaatacatacttttgccctccaatttaatagattcaagaagcaagtgtattagtttttaaagacaccttaagagaattaccagaactttttgaggcttagcatgtagcccccctggcctagaactcactatgtagagcagactggccctgaactcacagagattcccctgcctctccagtgctaggagtgctcctgagagcagccacaatgtcacctgtggttatcaggattataactactagggaacagtaagagttcaacttactttaggcagacttctcccaggacagcttcagacgaaggcggacaggcatcagaagctgcagagagcgagcgtagcacgaagactgttattgaattgagtgactgctgcccattcacctccaggttctgtgtatctcattgtactcctttgacgagcccttgaaagagatgtttcaacctgatttacacatgggaagtcagatggcagaggtgggcaccgcgcattgcccctcacgcccacagttcgttcccacacccatcagtcagttcctgctggcacttgactttgcagtcaatgagtacaagtgagctggtgagtgcttgagcaagaagtagtgtcaagtagggcagccataaagttgcctcacgcagagaatctgtaaccttgcctggctctggctgacaatatttttcctcagtgagcagatttagcttgattttaaactaattgtggtaaaggtaaaagctatgaagaacgttatggataatatttggggctacattcatatcttgaggaatctagagttggatgctgaaaataccatgtcgaataatgcatggcctctttccagaagttctctgccaaattggctttcagtaatatttcaggtccctgcctctctgtacttaaaacaacggtctgtggttagttcataactaacagccttctttggacaaagtatctagaatggaagctcaaggatgtgggcctcctgcagtggacagctgtgacctttgtctcaagttttaagaggtgttcggctgttggctaaatgccctcgtcttcctgttggagtctctcctggagtaattcatgaccgtacaaatgaacagtgctggctttgtgcactgactttgtatttcacttgcacgtgtgtgctgtcttactgttttctactgtttgggcccaggcagtgtttgctcactcactttagtctgtgtcccctctggatggtttcatagtaacattgaaagtggcattatagttccacttgacatccggagtgaggcataacagggggaaatggttagcgcttggaccatattttctcaagtgctttcctgaatgtttcttagacctccccaaagaatgcctgatgaaaccatgagaagtgactttttttttttctgtcaggaaaactgtatttctcgcgcacaaaatccatgggtttgccatctgtgttagcagagtaccaaggccccttaggagaagcagactggtgtagcagggtttgctcaggcgaagcacatcagccctgctcactctgagctgagaaaaattacttctttgcatcttcacttttattcctttagaggtcatgctgatagtcagttgagcccatatatagtattttcttcacatgaaatggaaagtttgcccggcagaaggcagctcgtgaatctacttcattctctgaacacagtattggatggtactcacctagggccgggcttcccttctccaagtatttgcaacttggagaggtctcttccgagttcgcagctaacctgtcgcacccgctgccaccgaccttggtctgtcttggtctgctgcgaagcccctcctcccttcgtgccctgtgcagctcctgattacgcagtcatcatctgcaggtgtgcacccttgagccactcatccttgacctgagtctgaatagtgaaagcttatattttagtcagtcagaagcatactctaggctgccttcccgttcccttaagtcctgctgtattcggtgtgcatacctgacgtttgttttttaaccttactgacatttatggcaaggattcggtggttaagggcagggtggtatccaagttcaagccatttgaagttccttggttttagagtagaataggggataaagcccactcagcgttcctgcttggatgagtttagtgatttgtagattttttttacttcagcagatttggtgtgtgtgttgtcggtgttttctacttccctgtaaattgtttttcttcccagagtgtttgctagaagaaatttcctgaggttggcctaagtgattatatagagtgtaagtggggtgaggctcagtggcacacacctttagtcccagtactctggggcataagcaggaagatctcgtgcgtttgaggccagtttcatccacacagagagattcaggacatccagggccacatagcgggacctgcctctaaacaacagcaaagagtaagtggggctgggcatagcagagcaggcctgccgtcccagcccttacagtgtagaggcagggggtgaggagtgtgaagccagcctgagctagctactgagcttttgggtcaaatagtcacaatctcttgagaccgggaccattgaacatctgtgaaaatctgatttcagtttagggggcagcaaggaagcaaatgtgactcgcccggctctccggaaaattcccaaagctgccagtggaaggaggtgcagacctgcagcgccatacttgggggcagagacaggaaacactggagtttaaagccagcctgggtacctgagaccccatctcaaaaaatagacttatttcccaaagataacatggctataaacatgaaaaaatgcagaataaaatgcttcatgtagaatcagcaagtgccagctagtagactagctgaaatagcctttcgaggactctcagctttctcacggcgcccatggccttgaagtcgttacccacatgtagggaaaagtaaccagtcagaggcagagttgggtcagcagggcagggcaaacactgggttctgacctgagagtgagcagcaggcataaggagtgtgaccatcccctcaggttgcaactttgcccacgcccactgcctgcattcaggaaaaccaaggcaagcacctgcaggaagagcctgacaccaagagggagcactggggacagcaggagtgagtcatggctgggaagaggatgagggggcacatgtcacctctcctcagtagcatgctgtggtgttctctgatgtgcccagctggagcacttgagaggaaattgcctgcgatagaggtgattttttttttttatggtcgtgtgacgcatatggtcgtgtgattgtttctaccatttattttaggaaaggtcctaagcaaataaccttctcttcacttctgatgctgagagctgtgtgtgtgaggttataaaatggccatccagaacatcctcactggcttccgtctctgtttcaggcatcctgacaaaaacaaagaccctggagccgaggacaggttcattcagatcagcaaggcatacgaggtacgcgccatcctccgcttccgtgccgccaccatttgctcctagaagatgggggggggggggttgggagatggcctagcacctcagccatgcacgcgggaggtgcagtgttgggatctgcggaacccacacaaatgccccctgcatcagtgctgagaaaggctccccggtcaagctgcctagctagaccagccttatccgagactctgcctcaaagaataaggtggagggtgactgagcaaacattggccttggatctccacaggcacctgagctcacatacatgcagacagaagtacaaatgtatacacaaagcaaagggaaagcaggcccgagctggtgagttctgtgacatcagctcagcagggcacagtgtccaggcagccccagtttcttcataatgttagagaaaatatctctgccccctccagcatgtcgaagcaagtgccagaacattgtcactcctggaaaacccagccaactttgaaagctttaataagaattgtgcacttacccagacagattgtctgtcctgactgtagagacccaggttaaagaatctcacaccagtttgcctggttacacaaggttacagataaccaaaacacaagattgtggtagtctccaacatgtcagcttaagtagcacggcctagaatacacataagcagtgggtgcctggctgcctgatttgctgtaatgtgtttcagcagatcgtgactcatcaccctaagaccatgattgaatttttgtctttaaagctaaatttcaataaggcaaagtcggtagtgagatggctcagtgagtaagggcgcctgccggccagcccaaggacctgtgttggcccatgtggtggaaggagagaactgacctccacccctgtgtcctgacagacatgaaataagcattgacgggagagctgaagtcagctcgtgcttaaggccctagactacacgttgctcaccttctgatgttcatggttagcgttcattggtccaaatgattctctctccagtggtgcagccagggtaatgttctatggcggatcctggtgatgtcatatgtcagatcttacctggtgtttactgggatggttgagagctttaatgtcaacatgagggtgacgagctcaccaaataaactcggagttttaatgtctctgttagggagtttgagatgaacttagtcactctgtgtatgtgtgtattttctgggcttacctgtgccacaacactcatgtagagctcagaggaaacttgcatgagatggctcccctgccatgtggattgaggaatggtcagatcttagtgaatctccttcccttcctccccagcccccaaccttgctggaggttgaacctagcgtccctactatacatttctgagaagcatacttccatcgttcaggttgcttacaggaaagccatttagggttggggtgtggctcagtggttaagggtttgccaagtgtgcacaaggccgggcttcggtcctcagtcctgaaagacaagactgtgaggaaggagagtcctttggtaagccacctgcctcgccctttggactccttctcttcttcctttcagatcctgtccaatgaggaaaagaggacaaactacgaccactatggtgatgccggtgagaaccaaggctaccagaagcagcagcgcgaacaccgcttccgccatttccacgagaacttctattttgatgagtcctttttccacttccccttcaatgcggagcggcgggactcgggtgacgagaagtacttgctgcacttctcacactacgtgaatgaagtgcttcccgagagcttcaaaagaccctacctcatcaagatcacgtcagactggtgcttcagctgcatccatatcgagcctgtctggaaggaggtggtccaggaactggaaggactgggtaaggtgttccattagggcacacttaaacagaaggtgaccctcttttctttctaagatgtaggtgttttgtgtatatgagtattcacccacatgtatgtacagaaatacatatatgtgcatacactgcatgcaagcggtgcccatggagaccagaggagagcgttcatccccaggagctggagttagaggtggttttaagctgctctgtgggttctgagaactgacccaggtcttcagcaagtgcagcaagagctcttttaaccacagaggcgtggatggctgcagccaggcgttcttagaaagggaacaattggtgtgttttctttccccaagttcatagtgagtgattttctttttcaagacagggtttctctgtgtagccctggctgtcctggaactcactctgtagaccaggctgccctcgaactcagaaatccgtctgcctctacctcccaagtgctgggattaaaggcgggcgcctccacgcccggtcgtgattgattttcaaggggtgtttatgaagaggtgtattaagctacttttcttcttctttcctttttaaatgtgtatgaatgttttgcctacatgcatgtctatacaccatttagatggctagtgcctgagaaggtcagaagagggcataggatcccctggaattggagttacagaggttgtgagccaccaagtgggtcctgggaattgaacccagatcctctgcaagagcaagaagtgcttttacccactgagctatctttccagactctacattctcaaaggcatatcgcagtatacctggctcttcttcttagttctctaaacagtagacttctggcaattgttgggccatttgttccaaataagtctttggtgtgcggtgcagaagcaggagggtacttggctttggccaaatgtgtccctgagcctggatacagctgcccttggaagaagctgggagcattgccatgcggtgtagcgaaggcagtgggaaggtgtttgctctcggtgtataatgctcgagagatcggggatgagaagtcactgactcagtagcttctggtcatgagacagctctgccttgtgctgtgggagagtgtagggaaaactgatctggggcagtgcgatgctaaacctctgtgcactttaggaccaagggcaggcacattgcatttcatagcttacactttcatgttgcacatgtgtgtgtatttgtgtgagtacacatggaggtcagaggataacttcgttctctccttccacctgtggtttttgggcatggaactctgatcatcaggttggcagcagaagtcagaaagatgtgaacacagaggagggcccacaaggtcagagatgcaggcagtcaccaggagctggaaagggtccagattgactgtccctgcagcttacagaggaagccagtcctgctgacaccatgactcagccctgtaggataaactggactccttgtctcagaactttaagatgagaagttggcatggtgtgtggtggtctgttaccatagccaaagcaacccatagctcctgtcaggaggaccctgtaggactcagggataaggagggtcgtgaggactccctgggaccaatgggatgagggaggctcaataccagcggtattagagggcttggtctgagagacgacaaacaactgggggttggaagggaggggatttgaactcaggctttgattgtctccgatctctgtttttgtggttgtttgtattaatgagacaggatctatctatgtaaccctgactgtcctgaaacttgccatctagatcagactggtctcaaactcacagaaatctgcccagaaaaagctgtccttttatctccacattcgttccatagggtcctcatgaagatgcacatgtgtgtacaacaatggtaacaatacgtaattgggtggaaagctttaggaaagattcccagtgttaacctctagcatcctcgtgtgcaagtgttgattagcgcacacacacacatgtacaccacacagtacacatgcacgcacacacgcacgcgtacatgcacacacacgtagagtggtaaagtgtcaaatgtgacactaggaaagcagatgccttcttttctgtcttctgcacagcttcattgtgtaagaattggttagctgggtagtggttcacacctttaatcccagcactcaggagacagaggcaggtagatctctgtgggttcaaggccagccgggtctacagagagagttccaggatagccaaggccaagccaagaccccaaaactggagcattcttgcatcatcacagatgaccaagaatgctggggccagagcaaactaagtatgaggagcaagaaaaagggagacaggagcaggggccacatcacagagtcctgctgtcctttttgtggactgtggtttcatcacaagcggagtgagtacttctttacagggtttgatcagagtagtgcaattcatttagaaggaacagtctggccctatgtgaagaacagactgcaacaagaaagcccacttaggaggccactgcagtagccagccaagaagcatgaagaagctgtgtgccgaggtgtaccctgtgtgtgctccaggcacctggcccagaggcaagaggatcagggcgttcagggttatccttggctacgtagtgaggtgggaggagaaggaggaggaggaggaggactgtgagagaggtaaaggctgctgcactgccgtcttctgaagagagaaccaggaggctgccagattgggtgtgggtgtgagggacgagagagggtggctgtctgtcgtttggactgtggaataggaggaatggagctgccatatttggaatgtcaaaggcagcattggagcttctgtgagaggagactgggagtccagtgtcaggagctcgacactttcaagcctaccagacccaaacacttctccgtattggctgttaacctcgcgcttagggtgtaagctggccctgcagacatgccagttaaatgaaagaacaagaggagacccggtattaagtgaaaaaagaaatgccaggtcacctacttcactgcacgtgtcctcagacacacacattcaaggagtgagcagatgggcgccaagctacccacagggctctattgtctatgctcttgaatggtgctaactggagtgtgctcactttataaactgtgtttgtgtatttcgtgtacggggaatgccagagcacgtgtgtggaggtcagagaacaaaggttgggactcagttcttgtttcacatctagttttaaggcaaggtactcagggatagctggcccacagagctctgggtgattctctgcctcccatctctccatggaaacactgagattacagatgcacactcggagctgaaatcaagtctttaggcttgtgtagcaagctttttactcactaagccatctcctggccccttcttgtactttgtaaagattctgtagctatgctgatggtgcacacttctagtcccagcactcaggaggcannnnnnnnnnnnnnnnnnnnnnnnnnnnnnnnnnnnnnnnnnnnnnnnnnnnnnnnnnnnnnnnnnnnnnnnnnnnnnnnnnnnnnnnnnnnnnnnnnnnnnnnnnnnnnnnnnnnnnnnnnnnnnnnnnnnnnnnnnnnnnnnnnnnnnnnnnnnnnnnnnnnnnnnnnnnnnnnnnnnnnnnnnnnnnnnnnnnnnnnnnnnnnnnnnnnnnnnnnnnnnnnnnnnnnnnnnnnnnnnnnnnnnnnnnnnnnnnnnnnnnnnnnnnnnnnnnnnnnnnnnnnnnnnngaggaggaggaggaggaggaggagaaaagagaagagaagagaagaaaagaaaagaaaattttgttttgttttgtttttctgtgaataggtattttgcttggctgtgtgtctgggtcttgttgtttgagacaggttgtggtgttttgagtaagaatgctgcccataggcttatatatatatgaatgcttagtcatgagagaatgtcaatacttgagaaggattaagaggtgtggccttgttacagtaggtgtggttttattggaggaaatctgtcactggggtggaggtttcagaagcccaagccaggccccggggctctctctcttcccgctgcctgcagactccattgtaaaattctcagccagttctccagcactaattctgtctgctgctgccatgaacctgccatgattacaatggactaaacctctgaagctgtaagccagccccagttgaataccttcttttataagagttgctgtggtcattggtgtctcttcacagcagtaggacagtgactaagacagagtagccttgactgacatggaacttgataatgtagaccaggctggcctcaaactcactgagctctccctacctctgcctcctagtgctgggatgaaaggggtgtgccacatgcctagtccagcaaatgcacctctgcatcacgtgtgtgcggtgcctgagaaggccaaggaggatgggtgtctgattctcaggaaatggagttagagatagctatgagtcaccacgtgaaccctgatcccagtggagccggggctcttaacgcttgaccttctctccagccccccaaattgtattgtgttgtgttgtgtagttgtattgtattgtattgtgtgaagggttgctggagggggatacacatacaacagcaagcatgtggaggtcagcagacaactctgtagagttgattctcttcttccacatttccatgagctccagggctcaaacccagagatccatcttgtacagcaagcacatttactcactgagccttcctctgggtacaacatttgtattttcagtatgtcaataaagtaatgtaatatatatatatgggagatgtgttcccaagggtgagatgtgactttctcttattgatgagtcataggctgtggtgctgggtgggagactgtcaccgaatcactggcctcttaggttattcatacatgtttgtttatgggtaggaacattgtatccagattgccctttttgtatttactctgtgtgtgtgtgtgtgtgtgtgtgtgtgtgtgtgtgtgtgtgtgtacacaagtgtgcaaagggggctggagaaatggctcaatggttaagagcactgactattcttccagaggtcctgagttcaaatcccagcaaccacatggtggctcacgaccacctgtaatgggattcgatgccctcttctggtgtgtctgaggacagtgacagtgtactcacacatattaaataagtaaaatcttaatccgggtgtggtggcgcacgcctttaatcccagcacttgggaggcaaaggcaggcagatttctgagttcaaggccagcctggtctacagagtgagttccaggacagccagggctacacagagaaaccctgtctcggaaaaccaaaaaaaaaaaagtgtacaaaggtcagaggacaaacagttctcttttatatcctgggagttccaggcatggaccccaggccttagagcaagctccttcacccactgcaccatctctctggcccgctttttttctcttttaatttcctcatcacttgttcccaaaattaggaataacaggcataagagatattcaggtttgcaaatatttgttctatagaaaaactggccaatccagaattctaacagtgcaagaaagctaaacaagctattaggaaaaatatgtattccaacccagttgggtttcattttccactgcaaaggacttgtcagcactccttcctgcccgagtctcaggaggcttcacagagcgcttccatgctttgcaggtgtggggattggtgtcgtccacgctgggtacgaaaggcgcctggcccatcacctgggagcacacagcaccccctccatccttggggtcatcagtgggaagatcaccttcttccacaacgcagtggtccatgaaaacctacggcagttcgtggagagtcttctcccaggaaacttggtagagaaggtgagtgtccccggagaatggagctgccagccggaacctcccaggcttcgctctgagcagccaagacactaccacttcattacaccaagtagtgcgagaagcctgaggaggctggcagccgaagcagggtacagagctgggaagagcgcactgccgttaggaaccgctcacaggctctagacatcacgggaatctgatctgaagccacagtcctgtttactaaacaacaacgaagttagatcacgtggtagaatttatggctcatgcatttgttcataggcacaaatttgtgctatgaaaataggaaaatcagattacattgagaaaaaattaagtacatttggattttacatttttaaatgtgtattaagtaagtatattcatatctaccaaacccaccagattcattacacagatattatttctggaacattaaaagcttagtgaggagcagtcatggtggtgcacgcctttcatcctagcactcaggaggcagaggcaagtggatctctgtggctttgaggttagccaggaccacgtggctacaaaaagtgaaaagcttattgagggcccgagagctgtctcagaaggtccagatgcttgctgccaagcctgacagcctgaataattcccagcagctcctgaaagttgtcctgtgacgactcacatgtgcacgcgtagctcatgtacctatatagcctatacacacgcacatacaaaacaaagactgtaatgttgttgttgtttaagactcgggtcctcttggataagagcagcacacacccttaccctctgagcatctctccagcccactaggccatgtttacagggcaagcgctgcatgccttctatggaactgaactctggggaccaatggcagggcttatgcttggagatgccctggattcgatctctagtactcctaccaaaaaacaaacaaagaaacaacttgagaagtgattttataatatagtcagtaattctttcaagcaggatgataattttaatctgtaagagtttataaagagatgacatctgtgttgccattcttctaatggctttgtcaaattaagacagaaagactagtggcaaggccggcagatctcagtgaggtcaggccagcctggtctgcttagcaagttccagtccagccaggactaaatagaccctttctcagaaaaggcagaaagattaattgtctgcatttttgttttttacaaacagcctctttataagcacccatatggcactcccaaccattgtagctctggttcctgggaatttgatactcgcttctgacctctgtgaccagacatacatgtagtatgcatacatacatgcaggcaaaacattcatgtacaaaataaaaatgaataaattattttttaaattagatgttgcaactaacctattttcaatttaaggtcacaaataaaaattatgtgcggttcctctctggctggcagcaggagaataagccacacgccctcctgttcggccagacaccagcagtgccactgatgtacaaggtaatggatctggggagcagcttccagtctttctggtgggggccagctctgcatcagagcccaaagcctgcttgtccttgggataattacatatttgagcatttttaatttaaaaattccaaatcagaaaactcttgaccatcagtgtctcaccacattaggaaattctacccctgacctcgtgtgacaggtcacagtcaagacagaggaacacattaaaatatgcacaattaccttcacactgagagtaaggtatatgtgaaacatacaggttttatgtttaaatttggtgtgtccccaagaatgcttcactatggatatgctaatactataaaatctgaaaaagcctgaaccattcaggttgcaagtatttcagaaacagttctgcctgtggtagtttattgctgggatggacacacacacacacacacacacacacacacacacacacgcacagacacagacacacatggaccaaggcaagatttctggataatgattaatttgtttgatctcttgagaaaatgagtcattctcccttgtccagtttttgtgcataggatatcattagaattcctagagtaggtgtttgagggtgaggagactcatggttcatcccagccatgggcgtcagtgggtcccactgggtctgtaagctggatgccaagctgtcatttcccttccttcctttcgtccgccctcacagttgacggccttcgcatacaaggattatgtgtcgtttggatacgtgtatgtcggcttgagaggtgtggaagagatgaccaggcagtacaacgtcaacctctatacccccaccatgctcatcttcaaagagcacataaacaagcccgctgatgtgatccaggtatgtgagccacctcaggccgagacggtcttccttttaccccagccttcacataaatatgcactgcaagggtcaggcgttcaagaacacatgagtctgtggatagcctaagctagagtgagactttgtttcagatgacaaagaaagaaccaagatggctcagtgggtgaaagtgcttgctgcctagcctgacccctgacccctgagttccatttctgagacccacggggaagacaaagaccaactgctgtgggtcatccttgacctgagtgtgctgaggcataaacatgcacactcatgaatgagagagacggagggagggagggaggaaggaagggtgttgggaattgaacaaaacagctgaatatagggacaaattcatttggcgtttcttcttactgatgcactaaattttgttgttgttgttgttttatctgacacaataatgttttgcttaaaaaaacaaaattgtctcccatggcacgcacctggaattctagtattctgaaggccaaagcaggagaatctgggtttgagagaggagttagttgttgattttttaggtttgctttttagacagggtctcacttgctgtataaactaggctgaccagcaactccagagatctccttgcctctgcttcctgagtgctgggataaagatgtgtgccaccgtgcccactaacccttgactttgaagtggggctacaagttttattaagtgctttgtttggaggctggaaagatggctcagcagtttaaaaatatgtactgctcttccagaacccaaagttccagagttcagttccctgcacctacgttgggcagctcaaaactacctgtaactccagttccagaggctccgacagtcctctgtggacctagtgcttgcctatgctcctacacacacacacacacacacacacacacacacacacacacacacacacacagctcaaaactacctgtaactccagttccagaggctccgacagtcctctgtggacctggtgcttgcctatgctcctacacacacacacacacacacacacacacacagagctcaaaactacctgtaactccagttccagaggctccgacagtcctctgtggacctggtgcttgcctatgctcctctacacacacacacacacacacacacacacacacacacacacacacacacacatctttttttaaaaagattcattcattcatgcatgcatacgagtgctctatctgcgtgtacacctgtgtgccagaagagggcgtcagatctcattacaaatggttgtgagccaccatgtggttgctgggaattgaactcaggagctctggaagagtagtctggaagacctgctgagccatctctccatccacccccccataattttttataaataagaataatacactttatattattgcctgactgttgtgtagtaaatatggtattgcctgggccatccatagttaggctgtatcctgcagtggttcagtcaagggaggaaagacagaaagacagtctctacccagtgtgctaggcagcttgttcagcatgaagaatagggtgtctgagactggaaattgggaaagtcatttgtgaagcagaaccagacgaagaaatggctgacagggtaagaagaggacaaactggtcttagcatgctgaattagagctgctataccaaatgtgagtggagaagaccctaggtgggcgggggacagcctgggcagggcaggtggaggctgggctcacaatctcagcactctgaaggctgcaaatagctagcaagaattcaaagccagctcaggaggctttcggaggctgtctggggggctgatttgttaggtctggcctggcaggcccagagccccaggcttgaggcaaagcattggagaagccagtcagtgcaggcctgtggtcccagcactcggtatgcagatgcaagaagaaggaaattcaaggacattcttaactaacatagtgagatcactatgacatctggccacttgagatgacctactaccaagaggtaggtaggtgggaaatagaggtgggcaggttgtgagcacatcactgaatggttggtttttaaaaattatagccaagcagtggtggtgcacgcctttaatcccagcacttgggaggtagaggcaggtggatttctgagtttgaatccagcctggtctacagagtgagttccaggacagccagggatacacagagaaaaaaaaaattataatcttttttgaaattaacacttatttgtgtgcatctacacattcatgtttgtggacaggatactgtggaagtcagttcttcctctctgtgggtttggagaatccaactgagaccggcaggcttgtcggcgaactctcttatccactgagccatctccctggcccagggtcttatctgtcaactcaccctccttcatacttgtgaaacagcaccttctgttatactctctcttctgatttaagcaatacagttgcttctcaaatatcgactttgtatcatccagcagctgtgcaagcacttcagccgtcagtcattatctgtcctgtctttaggatttgagtacacagcggctaatggcggttttgtgtctcctctgtgatgtctatcctttgagctgcacgaagcatgacagagcatttagtgttcagttttgtggtctgcctcttatttcttagaaacagtgaggggctgggatgtccgagtggtagtgctctcttagagtgtctgaagtcctgagttcactactaggaccacgtaaacttgatgtggtgacaaatgcctgaaatcccagcaccaggaaggtaggaagatcagaaacgcagggtgatcctcagctacataacaagctgggatccagcctgggctacacaacacctatctctaaaggacagtgggagctggacatgatggtacaacactctggtgacagggacaggtgtgaatttgcaaatttgaggtcatcgtggtctacatagacgttccaggccagccaggctgagtagtgagaccctgtctcaaaagaacaaaagctactattgtttgagtgtttgttttgttttgtcttctagaggaacagttattgaaaccagagctttctccatgctagaccagccttctaccactgagccatctccctgtccctgcagtttattttgaattgtttagtttgctacagattccaaagtagaaatatatttgtgtaaaatcaaaacttattgactcaatctgttagtgtaaattggtatgcagagtcctgcaatggaaacctcttgattttctcctgagcatggcctggctgcatcctgaccttcacctgagttgttaaccagcattttacacgtgcctagtagtgttgctttagccagggtcagccacagtcttcataagtgtgcgagtaagcccatgtgcagtgtgacaactgagtgtttgctgctgtttctccaggctcggggactgaagaagcaggtcatcgaggacttcatcgcccaaaacaagtacctgctggcctcccggctcaccagccagaggttgttccatgaactctgccctgtgaagcggtctcaccgacagagaaagtaagaacttgaggctctgccgctcactgaagtggtgtggtatctttctgaggggtagttaaatctctgtgatggggtggggtgtcttagtccagggtaccttcagaccacatgctgaaattatagatgtaagccaccatatctagcagatacctggcgagcctgcaagatggctcagcaagtataggcacgtgctatcaagcttgatcacctgggtttgctccctgcgatccacacggtggaaagaggattgatccccacacaccgagatagcttacggtttaagatctatctgaaatctcactgtttaccactaccactcttgagcaggctactgctgtgtctcgtgggtctctgctctcatgcatccccttgcttgggactcagttctccacatgtttgccattggtatctccaaacccaggtcagaccaagttgttccaccctcttttcctctcctacaacaccttatccaagtctctgctcatacatcaagtggtaggtatttttctgacctgcataagtacaaccttgaccccaccccagcctctctctgtccctcttccccttctcacagaacttatcaatacccatttatgtgtctgtgtatctgtcttctctacaggaacaagtgtgggagtgttgtctaggagctcagtaaatgtctgggaaagtgaatggataaatgccaggcttcctttaggaccttgtagaggcagccccttcagtcacctctgccctaagatagatcaaccaccacccctccctgagagagatcatacagagtgtgtctcttaaccggagcagctattgccagcctgaccttccctcaggattggttatagatcctcctctcttatctgtgtacagatactgcgtggttttactgacagctgagactaacaaagtgagcaaaccctttgaagccttcctgtcatttgccctggcaaacactcaagacacggtacggttcgtgcatgtctacagcaaccgacagcaggagtttgccagcacattgctaccggacatggaagctttccaggggaagtcaggggtgagccatgggccccattccccattcctattcccattcctcctgtcttgggagtgctgagtccagagtccagacatctgcaaacctctgagacctgggggacccttattcagacctccctccatcctttgcctactgagtttgcatcccccatgagggctccagacctcctggaaggcccttttcctccactctgattccatcccagctaagccctctcggccactttccatgaggggaggttgagatgggtcagccttttccagcagcttttcctgggaacagctttagtggtacagaactcaagaggcccattctcccaatctcaggccactggtgacatactcagaaccctcttccttcctcgtgttctttgcctgtgccatcacccccacccctacctccaaatgcctggggttcttcttgtggagtcaagattgtagtttgatgataagagtgcttgcctgaaaaacacgaagccctaggtctcatcatcagtgcacagaaagaagaaaaagacctatagtctcattcagttatcatgaaaaagctctgcaaggcgaaggctccttagctgggacgttaaggcagaagctgttacacaaagtctatgggaagaaaaagaggcttagaattttgacaaaagcttaggaatgtcaccataaaagtaattacttctgcttttattttttataatttttctgttgtagtggatatgcctgtaaacctggcactgggaggtagaggcaggaaggaaattttagggcagcctgggctacatgatacccagtatcaaaagtaagcaaaaactgagttggaaaaattgctcagtgattaagaacactctctgtcaaattcatgacctctttttattgattgctattgctaacacacatacaaacacacacccacacacacattcctaaatataacctgttcagtttatataatactacctgtacagtatgttttcagggctgactgttggtgtaccctgggcaagaccacttctcccattccatgaataaatttcttaaagaacaaaaaattattctgggaaggccaaggtttgaggatctcttgagccgaggcatttaaggccaacctaggtcacaaaatgagagctcatctcaaacctcactaactcctgggatgggggtggagttcagtttgtagaatgcttggctgacatacacaaggctgagttcctcccagcacagttatccagggatgctggtgagatggagccaagttcaggctcatcctcacagctgcacagtgagtttgaatactaaggattctttttgtcagaaagacctcaaagcctcttacaaacaccatagacaggatttatgcattagcttagttagtgacctcatgaggcccttttgaccatcttccctgggacaaagcgcaggcaactgcagctcacggtttgacaagatacactatgtaagtccagactgggctcatttatgtatgtatttattttatatgagtacactgttgctgtcttcagacacaccagaagagggcattggaccccattacagatggtcccagcaccatgtgggtgctgggaattgaactcaggacctctggaagagcagtcagtgttcttaacctctgagccatctctccagcccctgggctcaagctcttgatcctcttaacctcagcctcagcctcccaggaagggggggagggggctggagttattggtgtcgttatatcctgttgcttttgagactcttaatggtctttctttttttctctcaggtgtccatcttggaaaggaggaacacagcggggagggtggtgttcaaaaccctggaggatccctggaccggcagtgagagcgataagttcgtccttttgggttatcttgaccagctgcggaaggatccagcatttctgtcttcagaagctgtgctccctgacctgactgacgagctggctcctgtgagcatcagggtccagaagaatgggccagcaggaggggtggggcagtgtgagggggcggggcgggagcagggcgggattgaccactgcctgtttcctcccacaggtatttttcctccggtggctctactctgtttctgactacctctcggacttctgggagagcctgcttcacagtaactggtaggacgctgtgggtttcttttccttgtcaaagccagcctggaagcccgcgcttggatttgtgtgcacttggctgctggaagtaggcgagctcacacagcccgataaccgacttctgctgcctttgctttgcttcttaccatttgctgataggtccttcctgctgggcgggaagatcaccccagctggcctccctggcagcagggctggtactagtcctccttcactcttggctgtgtcggccactcagcacagtgtgtgcacgcacagataaatatgtctgtccatgcccaaaactagcttggggaggagaaggtttattttggcttacaaaccaagaccacagaggaatgctgcttgctggcttgctaagcggctgttcctacactccccaggactgcctgcccgcagtgggctaggccctgccggatcaattagtaatcaagaaaactccccacaaacatgtccacaagccaggctaatggaggcaactttcccgctaagttccctcttgccaggtgactgtagtctgtgttcagttgacagctgaagctgactgtgacgttccctgtccatctgggccacatctgccattctggccacattcagcgtctgagatcattccctagagtctgtagccaccagtccctcagtgtccgtccgagagttgcttcctgtatcctctcgtacagaatgtattagacacagccgaaagccaccccccacttcttcaccctcgaaacagcctgtcttgtgctcttgtttcttggtgtgagagaagtgtggtttgggacctttttctcctgagtcagctgaaagccagatcccgaggttgtgggctcatggctgaaagccagatcccgaggttgtgggctcatggctgaaagccagatcctggcggttgtaggctcatggctgaaagccagatcccgaggttgtgggctcacagctgcctttgcttccaggcgggagatgatgcccctgctgtccctcatcttctcggccctcttcatcctcttcggcacggtcatggtccaggctttcaggtacccaggggccagcccaccaggccatgtctgcccttcttgtttagaaaggaaagtaacttctgtttccatgctttagtgactcaaatgaggagcgagagtcgcaccctgcagacaaagaggaagtccccgagaaggctgggaagactgagccgagcttcaccaaagagagcagcaggttcttcccacacagcacaccctgccctcagcctcgtagagcgttaccgagatgggtagagaggcctccttgcctgcctctaaaacctggctgttggtttgggggagggagttgcaatgcggggtatggaacccagggcctcacatgtgctactcactgagcccccatgctaaaataacctgaagtggacaactatggatagcagtgtaaggccacatgtactgttctgaaatagccagtcatggtggcacacgcctttaatcccagtacttaggaggcagaggcaggtggatacctgcgagttttatatagagtgccaggccaaccagaactacatattgagactcatcccagaaaagagcaaacagttgtgtgcctcatcggggagtcacagtcacagcaagtgcacgtgtacccacagtctgtgtgaagtcaccttcagactgaggtgtgtgaacagacataaatgtgctttgaccctcctcaacatgtcttacttgcacatttgcacacattataaaatgggaggggaatccagacatccaaagcacttctattctcaggcattctgagttctttgtatttgttatttttttagttgtgtccctgtgtgtctgtgtgtaggtttgtactctcagaggccagaaatattagatctccctagagctggagttccagactgttgtgaccttctggacctctagaagttcagtacatgggctggagggatggctcagcggttaagagcactgactgctcttccagaggtcctgagttcaattcccaggaatcacatggtggctcacaaccatctgtaatgggatctgacgccctcttctggtgtgtctgaagacagctacagtgtactcatatatatatatatatatacatatatataataaaatctttaaaaaagaagttcagagccgggcgtggtggcgcacgcctttaatcccagcactcgggaggcagaggcaggcagatttctgagtttcgaggccagcctggtctacagagtgagctccaggacagccagggctacacagagaaaccctgtctcgaaaacccaaaaaaaaaaaaaaaaaaaaaaaaaagaagttcagaacacactctccattcccaggcatctagaataagggaaaagccactgctgactggggtacactaagaccctctacacatgtagatacaggactactaataatctgagtgtcatgtgatttgcagtctcagctcaggcatgaaagcaggaagagaaagaaacacaagggaggtgatacgtgagccagaagctggggtagcgtgtccctgtgactcattactgcaagagacctgtccgagttaaaaacagactaagcatgtatggcctccatggctctcatctgtagtcacctttacactggactgaaagctgtgtaagaagggctactgtggaccagggccaccctgcagccccatgagtcctagtcagtgctgagaggcagatccagtcaggccaggcgctctcagattcactggttttgtgtttgttttggagacctaaggaggagtttgcatatttatttattcccctagcccaggctatcctcagactccccacataattgaggcttgccttaagcttcccgtcctcctgcctctaccccctagatgctagggttatggcatgccctgccacagtggcttccactgctttccgctccccgcatcctgaaaatgtctaaagttttccatatttctccacagcaagattcctaagaaaggctttgtggaggtgactgaactcacagatgtgacgtacaccagcaatttggtacgcctgaggcctggtcacatgaatgtggtcctgatcctgtccaattccactaagacaagcctcctgcagaagtttgctttggaagtctacacattcaccgggtaagcaggtggggtgtgtgtgtgtgtttctgagtgtgtgtgtgtgtgtgtgtgtgtgtgtgtgtgtgnnnnnnnnnnnnnnnnnnnnnnnnnnnnnnnnnnnnnnnnnnnnnnnnnnnnnnnnnnnnnnnnnnnnnnnnnnnnnnnnnnnnnnnnnnnnnnnnnnnnnnnnnnnnnnnnnctgttgcacacttcccactggatgagcagagctctgtgtccttcctgggccacatttctgccatcgttggggccttctcttgatgttagtttctctgcgtagccctggctgtctggaactcatgatgtacaccaggctggcctcagactcacagagttccgcctacctctactcgtgagtgctatgatttaagacgtgccagcatacctggcttgatcttgtactttcgataatcgacctcgatgctctcaatgttggaacagtcctcctacctctaccttccaagtgccagaattacaggctttctactactctcccttgactctcatgtccatgcaccccaccccaccccacccccagctccacatacatcctttcgtaagtccaggctgcagccagcacaaggctctctggctgttcagccttgtctagggtgctggcactgttctcctcagtggcctgcagcagaactcctggaaccttctgaaccctcatctgctcttcccacaggagcagcagcctccacttctccttcctgacactggacaaacaccgggagtggctggagtatttgctagagtttgctcaggatgcggccccgatcccaaaccagtatgacaagcactttatggaacgagactacactggctacgtgctggccctgaacggtcacaagaagtatttctgccttttcaagccactaaagacagtggatgaggagactgtggcctcctgtgaccctgactcctcccgagggaagccttcctgtggccttggccccaagcccctcaaaggcaagctgagcaagttgtccttgtggatggagcgcctgctggaaggctccttgcagaggttctacatcccgtcgtggcctgagctggactgagcgaggcctccagaggatagcgggccccaggaacagggattttaagagagtctccattgtagatttctcttctagagccatggctagaagacctttcctctgtcacctaggagtaaagcacgcaggtttgaccactagatgaacatcttccttccccttcgggttttctcccctggatgaatgccgcactacttcagtagactgcccagcccctcttctctgctgtccctataacgtgctcacacccctgtccttacactgcagaaacccagggcttgaccctgagccgtgcctggaccaacctcaggatcttcatgagcctgtctcatggggtgggtcactcacctctcccccagcccctgcagcaggctcctgctggcccctgcttggcctctgccaaggtgtgtgctctcaacacgggaagccaccacggcttctaggtcctccgtcttcaaaagaggcctagtgtgcaagcagttttctatgtggttgtgcttctgggagcaagcagtgagaagtatattttgggggtatcccccacaacagtcggccaagcatggttttgagaagaaaggggtgagcagggggtgaaggtgcagcattcacatttagtctcccgaccgagagggagggtgagcactggctggaggcgcagagccctgtgaccctgcgtgcacttccctgcccgtccccttccctcaccgcactctgtcagcaccagcacagccagggtgtctgccttgccagcactggagtggctgagctgctgacctgtccccagaggcctttttgcttctgggttttagagtttgatactaggagccatatcctgtgatcttgttctctgaacatagataagctgctatagagccagtagatttaagatggcagcacttagtcctacccaccaagagctaggtgcaggagcccttcctgcctcgctctccagtaaaacgccaggtgtgtcttcataccaaggaacctgacctctctgacaattgcattttgaacattgttgtccccaaagagctgaatcttcaggtcgtctcttgtgactgtgagcggagacttgtccggactcctgtcagtaggcagctagctagcatcctccttctggcgtccctgcttcactgtttcctccttcccttattgctgcttcccgctgccagatcacacccatcagctccagttcgcctggctccacgcaccttgagctcagggccggatcatgctcgcccgctcaagggcatacccttgtttttagagccaacccatgaggggagtttggacaactgtcacacatgatgtgttctactgtcaagcaagtgcccttttgtaaagggaagggcacaaatcagggaccggacattcactcagtgagtattctccagttgtaattgctttgaaccaagcacctcggatcctgactactttaaacactgagctccagtggtaagtgagaaattatttgaacccaggaactctgtagttttcaaagagtctttagctttattaaaaagtaaagaaaacactgccaggcttcattcttccatctgcccctctagcagtacatgccgattctccatggttctcgtgtgcctggcccagctagaaagggtgaaggcagtcttggctcctggaggctgaggataagctggggtagaacacttgccaggcaagtgcaaagcctggggtccacccccagtgtctcacacacagatgggtttttttcattcttcctctatttttatggctgggttcctcttatgagtttgttttaactcattgatagatttttgtctttacgtttctggaaccggtcaaatcccttgacatgtaatttctgaaaaccaaaaactccccagatgtttgttctcttctcaaaactgtaccaagaagataaaatgtctttccattcaagggggtagagaggagtggggacgggattggcataatccctgcagacccgatggagacgggtatctaccaaggacatcatgcaactttgatttgcttgcttgcttgcttgcttgctttaaaacaagagtctgactatgtagcccaggctggcctccaactcaaggccctcctgcctcagcctcccaagtaccgggattccaggcgcgcaccacaagtctacctttgacagatacaagcctttcttcctgaatgttgtttctatgaattgtttatttttgtgtcaaatatgagctatatttatgctcagccaaatgccaaggtttctcatcctaatgaatgtagtctcacaggacccaatttcggctcagatactgctgtgtgaggagtgggtatctgctcaaggcagcctgtgagtcatgttcagtagctgggggaaagtccagtcagtctgtggggtgccctctccctgctgctgggatcacctgcggttggcctaacccaagttaataagctgcctgagacattggaggaggccactctccctgtcacttgccaacacccaaaacagtttgcttggcgttttcagaagggtcagtctcctcatttgcagccaccattgatgtgtttgctgaaaaaatagatctgagccgtctgctttgcttcagctagggactagaagatatacccagcctctccggtttggtttgggttggtttggtttttcaaagtagaagaccatctggggctcaagctcagcggtaaagcacttgcctagggagtatgtgatcctcttgatttgatccccagtgatggggcggggggcgggggggggggcggaattaggtacaatcccttaaatgttgatgcagagatgtggtggcacatgcctgtaatcccagcagtcgggaagcagaggcaggaaaatccggacttgggggtcatccttagcatgagcaggtgagaccagcttgggctataagacaaatgatcccagactggggcggggcgtgagagtgcttgtgtagtgcttggggaggctccgtggtcttcagtcctagcaccgtaactaagtaaacaggtaaatcgttgttaagaagaggatgcggatgaaatgtcagctgtgtccacgtgtccacgtgcccttgaaaacaacggcgggacagaatctgctgccattgttagaaaggatagctgtacctggaggcagatctgagaggaaggtggctattttgcacttttgatactactaagaacaaataatttatttgacaaattgtgtcttttatgttttatgtttttccttttcagttttgtttggtttggttttgtattgtgaacaggcactaaagctaatgttattttgttttaagaatattacggactggaaacaaataaactattttaatgtgtgatggctctggggcacctctggaattgcaaggtgattcatggatacattattagagttgtatgacactcaatagtgctttctgtcagagcaggcacgggagatggcaggcatagaggggctgtcaacctgaagggcagataatgcaaacccgaggtatacagagagagttaagagttctctcagagcaagctggcagcatctggtttagtttttacccctagtcttgtttgaggtgaagggtagtaatgggtcttacgctctcaatcaggttagcctcagacacacatgaactcccctgcctcggtattccactgtagagacagatgctgtggagacggaatgcctgccctgcgctacttctcgggcctttccagttgacttgtctccttctcctgtttcctccaccttctatgaaagggaacaaagttaaagcagtagagactggccagatgacgggttctggtttcctgagtctggcattcttgctatataaccctagttaggctcaaatttgtaacagtcctcctgcctcagcctcccaagtgttgggactacaggtgtgtgccaaggtgcatcaccagaccgggggctgctgcatttctccttaggaatgtgaactttagccatgcagtggtggtgcacgcctttaatcccagcactcagaggcagaggcaggtggatctcttgagtttgaggccagcctggtctacagagtgagttccaggacagccagggctacacaggggaactcttgtctcgcagaacgagcttgggtggaaagatgatggctatcagttaagagcacttactattacagaggatgcagatccagctcccagcatgcagtggtggctcactgctatcttaactctccagctcgtgaggattaatcccacacccccttctgaactccacaggcacacataaaaatgaaatgctttaatgttaggagggaaggaaggagacacgagctgtttgggttagtgtcccagttgtccttgtttgcagccagtggtgacatttcacagaaagctttctttggtccttgcactgctggctcacaagtccttgaggctctgtcatgacatagtctgttttgtcttcaggaacacagactcagacagttgtcactttggggagagcacacagcatctcaaacagcaggttagctgctaggagggctgtgttacctaagagggagagaaaggctatgaagctggcacacgcctccccaaagccactctccaaggactctagccttcccagagccctggcttctgcactcgggatgccacctgcctgtgaacatgccttcagtccctaccgagcatcttttggagactgtaggagaatcctgagggacctttgatactaatggctgctcagggcccaccctcggcctaactggaagctttcttctttcttccagttagaattataggggtgacatctccttttcccaggtgtcagctaaagcaaccccctacttcacagcaaagcatgctttgcaaattcatttctcaatgaaacatcagaggcgatgccactgagcctccctgtcactaaccagcaacagctggctcctcccaggggttttgttccttgcattagctcgtgcctgtcgggtttgtgggggcaggcttctctcttcgctgctggatcttctccacggggtccccgaggtgaacatggaggcctacctcattagatggatctaatgtaagctcacagctaccccatggatcattctttcccctcactcaccagagagatcatacggcggggagacttccacaagatcgcagcccaccacattcaggccttggcagccccggatgatctccagagcctgtccaaggtaaatgtgacagtcatttccagtgaaaatagaggcccagatacccatccttggcctaggcgggtgctggctacagcctcgatgctgtttaaggtacacaattcacagcacacagcccctctctactaggggctctggggtgtgatagtggagtcaaaccaggcaatgtcttatgtcaagatccttgagacaggctgggtgtggtggcacacgcctttaatcccagcactcaggaggcagaggcaggtgaatttttgagttcgagaccagcctggtctacaaagtgagttccaggacagccagggctatacagagagaccctgtctcgaaaaaaacaaaaaaagatccttgagacaggcaattttcaggaaacagcctgggtgagggaaggcttcctgaagtacaaacaagaaaagaacattatgggcaaaaacacaggctaaggcacagaaacaagataggcacagggacatggatacgactgactcaaggtgtggctcggggtggggtttaggaacaggtacacaggccttaccaaagaagtttccatcctgcacatggaaagcagagggctgccgggcagtggtggcgcacgtctttaatcccagcacttgggaggcagaggcaggcagatttctgagtttgaggccagcctggtctacagcatgagtcccaggacagccagggctacacagagaaaccctgtctcgaaaaaaccaaaaaaaaaaaccctctccaggaatccactagggaagcccacttacctgactaggggtgagccccgcgatttccggtgtccctgttcctggggcataggcaggatccaaggcatctatggcaaagctgatataaagaggcttgccccccatctgctgcctgacctctgccatcagggggaccagtgacttcatccaacagtcttcagccaggaccacacggaagccctgtgagggccagagtcaaagagctggaggtgatagctgaccccaggcttggcctaacacatgcatgtcacatctgaccttggctgccatgaggcaatccacagttgtcaccccctcctctactgatgaagttaggaagcaaggtcaaggctgatgttattgctcacttatgcttctagatgcttctgtccagaactctgggcttgacactctaaaaatcaaaggaccggacagttgagacagctcggctggggtaaaggtaccacctgctgccaagccgagtgacctgagttcaatccccaagaccttacacagcagaagggaacccactccacaagtgtcctctgccctccatactcatgccacagagaataagtaaatataattaaaagcaaagtaaaatgaaggagcagatgtggtgacccccacctttaatcccagcactcgaagggaaaggcagatggatctctgtgcgtttgagaccagcctggtctacatagcaagtcccaggacagccagggctacataatgaaaccttgttccaaaaagagggactggggtgtttgtgtagacgccttacaccatgtttggatcatggctttccatctgccgggtgttacagtaaacactaagaaggggcatctgtcctaactcaggttcactacccatgtcttctaagccagcagccccccagggttggctctctgcttaattctgctacacagcaacaggcattctgcctcattaatgtgtcccaggcacagtggctcacacctgctgtcccccccccccccaaaagacaaaactcgggaggctgaggcaaaaccatgagttgcaggctagcctgggctacagcgtaagatcctgtatcaatacaaaaggagacttcaacaaccaagaatcagttatcaatactcttgccacatgagtcacttgattcaaactcagctttccatctccacttgccttttctcctctctctctctctctctctctctctctctctctctctctctctgtgtgtgtgtgtgtgtgtgtgtaagagagacacagtcacacacttttgcagttgtctctctgcttccactatgagggtactgggaatcaaactcaggttctcaaacttaacggcaagcccctttactccgtgaaccatggtgtcagcccatttctggttttatcctcaaacaaggtctcatgtagcccaggctcaccaggaattcaatatgaaactgtgaatggtgtcgaattcttgaagtttgggcttacagacctgtgctaccatatctagccccagcctcactttctgaacttcagtaaagcccctgttgactccctctttgaccatgcaaaagacactctgcggggataaagagaggtgtgcgtctgtcacctggctcctactgtatctgtagggatccagagtcctggaggagccccggatgcctatctgtaccactcgcttgctgtccagcagtccctcatccacacttcggcggaaaggtgtccgatggtagaccttctcctcccgaggtttgtccgtggtgttggtgtgggcacccacatgcactaaacccaccgggccatgcctggggggaaaacggcatctcagaggtcaacagtcctggcatcggctgcctacctcaagtctgctttcagtgttcagctcacctaggagaaaccaggcagaagcagacacgactggcctgccaccaagagtttcagagagaagggcaatgacggagctctgtaaaggctaaaccagtcagagccacctgtcacccggctaaggcaccggaagggtattcagagcctgtgcctctccatcagccttgctggacacggagatgaacacagtccatgctagcgggagcgtagaacagctcgagacaagactgaccccaccccaaccctgagtcacgatgctacccacatacccctccaactcagtcaggatgtcatccatgtgccctcccagaacgcccaatcagaatgctgcccacatgccttccctaaaacaaatcctgaagctcccacctcccttcctccctctaccttcctccagctaaaccagccaaagctggtcggtatcagtaggcttgcagctactgaaaaatctaccttctgttggccaggcaacgaaggagtctatggggggcagggagggaactgggcctccccaccccctgtcaatatttatatatggcttgcatagaaaaacaaatagttggagttgtatatttcactccggactcatgggccaactgaaaatgcaatgtgtgtgtgtgtgtgtgtgtgtgtgtgtgtgtgtaccatggcagatctaggccaaggggaaggacaccaagctgatgactgacagacacacatggagtcttagttttgagctacagaaacaactcagtggggaatttacaatagcccttccattacccacccccttcagtggtcgcttgatgtcatctagtagcaacctggaccttagctcctgaatgttgcaaccttgggacttactcctttgccacggcttgcagtatgggatatgtgattgtttggtctccacctacagagagaaaacaggacacatctgcaaacatgagcaagatcatcacatgggacagtcctgaagtccccaaagctgccaccctttcaggtattactacagaactgtatctacagctaaatggccatgggtggcattttaaaaggaaaatgtcttcccccatctgtggcatggtatttgatcatactgtgaaattgattgtgttgtttaccagaaaaagctgttactagttgtggtgtggctcagccttaatgcatatctttaatcctggctggaatacagacacacccttagtacacacacctttaatcccaaacaaggaagggaaaactagtttgtagaagaaagcacccatgtttgaaactgagtggcagacaaagtgatgaatcagagaaagatttgacagaatatgccccagtctcaggagaacagagaggaaagagaggtaacttaagagagagcaaggcagatggctccgtggttaagagcgccgactgctcttctgaaggtccggagttcaaatcccagcaaccacatggtggctcacaaccatccgtaatgaaatctgatgccctcttctgcagtgtctgaagacagctacagtgtacttacatataataaataaatctttaaaaaaaagagagagagagagcaatgcagaggagagaggcagtttttcctgggagagtgaggttgcagatggagacagaatgggccaaagaatgagaaggagccagattagaacatatgctaaagttagtatgaggccaagcagaggccaagcagagcaattcagccagaggccaagagaaaagccagattgaatcagtcagtttgaggagtttgagccagattagctgaattgaactagccagtcagagctcagaaagaacaagaaaggcgggctggagagatgactcaggggttaaaagcactgactgttcttccagaggtcctgagttcaaatcccagcaacacatggtggctcacaaccatccgtaatgagatctgataccctcttctgggttgtctgaagacagctacagtgtacttacatataataaataaatcttaaacaaaaaaagaaaaaaagaaagaaggaaagaaagaaaaaaaagaaaggaagaaagaaagaaaaagaacaagaaagggtaagcttactaagtgacaattctcataggctgaaaacattctaggataagactgtatagggctggtgagatggctcagtgggtaagagtacccgactgctcttccaaaggtccggagttcaagtcccaacaaccacatggtggcttacaaccatccgtaacaagatctgacgccctcttctggtgtgtctgaagacagctacagtgtacttacatataataaataaataaatctttaaaaaaaaaaaaagactgtataaagcttccaggactcggcctaggttagcagtaagcctccaagacaacaattacgtctgtcgaatcaaagttcatttatcagcggagaccggagttggagagatggctcaagcacacactgctcaataggcatccctcacgccaggcagctcacaaacctagaccggggaccaatccctccagccttcacaggtacctgcactcaacttgcacaaacccacactcaggcacacgagaggaaattacataaatcaacgcttatgagttgttctacgaaa

SEQ ID NO: 570 - DNA, 2618 bp, Mus musculus
atggaattgaaaaggttgggcgtgtcctggcgattcttgatggttctggttctgatcctgcaaagcctgtctgcattggattttgacccatacagagtcctaggggtcagccgcacggccagtcaggctgacattaaaaaggcatataagaagctcgctcgggaatggcatcctgacaaaaacaaagaccctggagccgaggacaggttcattcagatcagcaaggcatacgaggaaaagaggacaaactacgaccactatggtgatgccggtgagaaccaaggctaccagaagcagcagcgcgaacaccgcttccgccatttccacgagaacttctattttgatgagtcctttttccacttccccttcaatgcggagcggcgggactcgggtgacgagaagtacttgctgcacttctcacactacgtgaatgaagtgcttcccgagagcttcaaaagaccctacctcatcaagatcacgtcagactggtgcttcagctgcatccatatcgagcctgtctggaaggaggtggtccaggaactggaaggactgggtgtggggattggtgtcgtccacgctgggtacgaaaggcgcctggcccatcacctgggagcacacagcaccccctccatccttggggtcatcagtgggaagatcaccttcttccacaacgcagtggtccatgaaaacctacggcagttcgtggagagtcttctcccaggaaacttggtagagaaggtcacaaataaaaattatgtgcggttcctctctggctggcagcaggagaataagccacacgccctcctgttcggccagacaccagcagtgccactgatgtacaagttgacggccttcgcatacaaggattatgtgtcgtttggatacgtgtatgtcggcttgagaggtgtggaagagatgaccaggcagtacaacgtcaacctctatacccccaccatgctcatcttcaaagagcacataaacaagcccgctgatgtgatccaggctcggggactgaagaagcaggtcatcgaggacttcatcgcccaaaacaagtacctgctggcctcccggctcaccagccagaggttgttccatgaactctgccctgtgaagcggtctcaccgacagagaaaatactgcgtggttttactgacagctgagactaacaaagtgagcaaaccctttgaagccttcctgtcatttgccctggcaaacactcaagacacggtacggttcgtgcatgtctacagcaaccgacagcaggagtttgccagcacattgctaccggacatggaagctttccaggggaagtcaggggtgtccatcttggaaaggaggaacacagcggggagggtggtgttcaaaaccctggaggatccctggaccggcagtgagagcgataagttcgtccttttgggttatcttgaccagctgcggaaggatccagcatttctgtcttcagaagctgtgctccctgacctgactgacgagctggctcctgtgagcatcagggtccagaagaatgggccagcaggaggggtggggcagtgctcatggctgaaagccagatcccgaggttgtgggctcacagctgcctttgcttccaggcgggagatgatgcccctgctgtccctcatcttctcggccctcttcatcctcttcggcacggtcatggtccaggctttcagcaagattcctaagaaaggctttgtggaggtgactgaactcacagatgtgacgtacaccagcaatttggtacgcctgaggcctggtcacatgaatgtggtcctgatcctgtccaattccactaagacaagcctcctgcagaagtttgctttggaagtctacacattcaccgggagcagcagcctccacttctccttcctgacactggacaaacaccgggagtggctggagtatttgctagagtttgctcaggatgcggccccgatcccaaaccagtatgacaagcactttatggaacgagactacactggctacgtgctggccctgaacggtcacaagaagtatttctgccttttcaagccactaaagacagtggatgaggagactgtggcctcctgtgaccctgactcctcccgagggaagccttcctgtggccttggccccaagcccctcaaaggcaagctgagcaagttgtccttgtggatggagcgcctgctggaaggctccttgcagaggttctacatcccgtcgtggcctgagctggactgagcgaggcctccagaggatagcgggccccaggaacagggattttaagagagtctccattgtagatttctcttctagagccatggctagaagacctttcctctgtcacctaggagtaaagcacgcaggtttgaccactagatgaacatcttccttccccttcgggttttctcccctggatgaatgccgcactacttcagtagactgcccagcccctcttctctgctgtccctataacgtgctcacacccctgtccttacactgcagaaacccagggcttgaccctgagccgtgcctggaccaacctcaggatcttcatgagcctgtctcatggggtgggtcactcacctctcccccagcccctgcagcaggctcctgctggcccc

SEQ ID NO: 571 - protein, 738 aa, Mus musculus
MELKRLGVSWRFLMVLVLILQSLSALDFDPYRVLGVSRTASQADIKKAYKKLAREWHPDKNKDPGAEDRFIQISKAYEEKRTNYDHYGDAGENQGYQKQQREHRFRHFHENFYFDESFFHFPFNAERRDSGDEKYLLHFSHYVNEVLPESFKRPYLIKITSDWCFSCIHIEPVWKEVVQELEGLGVGIGVVHAGYERRLAHHLGAHSTPSILGVISGKITFFHNAVVHENLRQFVESLLPGNLVEKVTNKNYVRFLSGWQQENKPHALLFGQTPAVPLMYKLTAFAYKDYVSFGYVYVGLRGVEEMTRQYNVNLYTPTMLIFKEHINKPADVIQRLKKQVIEDFIAQNKYLLASRLTSQRLFHELCPVKRSHRQRKYCVVLLTAETNKVSKPFEAFLSFANTQDTVRFVHVYSNRQQEFASTLLPDMEAFQGKSGVSIRRNTAGRVVFKTLEDPWTGSESDKFVLLGYLDQLRKDPAFLSSEAVLPDLTDELAPVSIRVQKNGPAGGVGQCSWLKARSRGCGLTAAFASRREMMPLLSLIFSALFILFGTVMVQAFSKIPKKGFVEVTELTDVTYTSNLVRLRPGHMNVVLILSNSTKTSLLQKFALEVYTFTGSSSLHFSFLTLDKHREWLEYLLEFAQDAAPIPNQYDKHFMERDYTGYVLALNGHKKYFCLFKPLKTVDEETVASCDPDSSRGKPSCGLGPKPLKGKLSKLSLWMERLLEGSLQRFYIPSWPELD

SEQ ID NO: 572 - DNA, 52710 bp, Homo sapiens
gaatagggttaaagagaatagggaccagagagtgcgtccccatcctagcaactgttgctagacgagggccatctcccggtaggagcggaaacaccttcctggatcgaggaggtccttctggtatcccatcatgcatagcgacttcgcctcgctaggaggcacgttttggcctctttggtcacgatcagccttttggctgcaaccaaagagcgcgcctcgtttctatagcaaccaccccaggtccacgcctagacggcgagtggcaagggtcaaaatagattcgcccagtagacgccctcgacctgttcggtcctcgccttcagtgcgatagacctttaagcgtcacgtgactcccctcgggcttgtcccctcctctttcccctccccaggcccaggcgagcgctggtgtggacgggaagctcccggcccggcgaactaactggagcacggagctgcagccggttgggccggtgtactttcccggtaactccttcccggcgtgacgcgcggaaccgcggacgcggcggggccaggccgactcagggatttcccctcagttccttctcgtttccagtcactgctggccccggggggagccgggagccaacagggccgggccctgggctctcggagggcggcgggggagggggctgtctcctgcagggttgcgacctccggcaggagcgcgaggcggggcttagacctggagcttgtctctgggagcttcttcctggtcctggatatgctgcccagagagctggcagcctacctgttgggcaggtgtttgctgctccgaggtcggcgccgtctatctcgcatgtcagctaaagaacttcccagaccaccgccacttcggccctctagctggaaggaactgacatggttaaataaggcagcgatcgtactgcatggtagaaataatagcactaacgaccatttgttgactgttgactctgggctcagtaaaccctttacatgcatttagtccccacatgatgatccttcaaggtggtagtattcattcccattttatgaataaggacgctgatgcttagtaagtttaaataatttgcccaaggtaataaagtagtggagaatagatcctagtcttcaacccatatgcttaaccagtagctacattgccttcacgtgttttctaggatataataggttgccttaacaaagaagaaactggtttgttttaggattttattcagcacgtatgcaattttaaacgttggtcatcagattagtcaattttgtgaggactcccaggcggcattaaacttgcacttacggaaatccaccactgttatagctttgcccttcttcagtaaggtgtcacagaagacacttgaaccttaaaactgtattaacttgtgagaaatcaagataaatgtgttccttgaaaaaaaacattgtagggtataacagcaatcataattgtggagtataaatatctgcagttccagcactaccctgttcattaaccagccaggattatttccaaaattcacaatgaattaagtcactgtactcaccagagatggagcttgaaacttttaaagaccacgcctgctatttggtctttgccgttaattcttcttcacatgtaaaactaaattttttcttgccgctttttctcatctgaggtttccattaataatgaccatattggccggcgcgatggctcacgcctgtaatcccaacactttgggaggccgaggcgggtggatcacctgaggtcaggagttcaaaaccagcctggccaacatggtgaaaccctgtctctactaaaaatacaaaaaattagctaggcagggtggcgcatgcctgtaatcccagctactggggaggctgagacaggagacttgcttgaacctgggagggggaggttgcagtgagctgagagcccatcattgcactccagcctgggcaacgagtgaaactccgtctcaaaacaaaaaacaaaaaaacaccatattactaatgattaaagagcagcttctcattttcttgtttgaatggtgtggtgagaaagaatagaattgaggcatactgcgtcttaactacacagttttttgagagtgtttcacgtccatgtttgtacttatttaatgcccaagaatgccacaactatctcattttgtagttttgtacatggtaaatcttacagtttcatgagtttgtttaacatgtactcaatgaagtattcttaaaccatttattttatttattcttatcagaataaatgaaatcatgtatttgagaggtagtcgtcctgattatcctatttaggttttctctcatttatgtattatttctgcatcccattcattttcattcatttctaaagcttttctagtcaaagtgttctggagagttgctattcttattactcatcttttcatctgtaatagttctcatttgtgatattcaaaagcagtagcgagatttttattttaagatacagttcaacagcttgacacttttcctgcaaaataccttttgttggttttgtttttcatctatatatcttatacctttacctaaaaagcaagactgtccaggtttctgccactgaaactcattgcctcttcaatcatttcagctctggaaaggaagagaaatggaagtgagaaagttgagcatttcctggcagttcttgatagttctggttctgatcctgcaaattctgtctgcgttggattttgacccatacagagtcctaggggtcagccgaacagccagtcaggctgatattaaaaaggcttataagaagctcgcccgggaatggtaggtgaaacaaagaaatagaggtttaacataagctaaacagtcttagcagggatgaagtctaaattatgactagcttttatttgtctctgtttctatgttcaatatatatatctgtctaaaatattttacgcaggagagctaatgttcatgttctataattgttagcgataagatccaaagcctatgtttactctgaaactcccttttaggaatactttggcttaaagaattgccttagatactgttagcatatttaatgttaaagtaacaagttttaattttaaaaaaatgtatatatagtcaataatggatatgctacccttcccatgatacattattcataaagtaactttatgagtgtaattgctaaacaggaacactatacaaccctattctctaaattattaatttctacactttgaaaaaaagttaagagtaatagccttttgcctccaaaaaaaaaaattcagaaaccaaggatagttgtctcttgatatccatgaggtcttggttccaggatccccagaaataccaaagtcattggatgctcaagtccctatataaaatagcatagtatttgcatataatctatgcacgtcctctcatatactttaaatcatctctagcttacttataatacctaatacaatgtaactgctgtgcaaatggttgttatactgttattgtttaaggaataatgacaagaaaaaagtctgtacatgttcagtacaatgcaattttttaaaaatatttttgaatatttcaaaatagaaaatattatattttggttggtggaatccatggatgtgaaaccaacagatatagagggctgactatatattactcaaaaaaaaaaattggcctggcatggtggctcatgtttgtaatcccagcactttgggaggctgaggtgggaggatcgtttgagcccaggagtttgagaccagcctgggcaacatagtgacacctcatcactatggaaaaaaaaaaaaagcccagaagtttgaggctgaagtgagctataatcacaccactgcactccagcctgggcaacagagtgagacccgtctcaaaaaaaaaaaacttacagaaaattgtaattttgcctgtagttatcaggatagcaattagcagggtagcaataaatctaaaactttggacaaatatcatcagtttcttccaccaatgccttggccatgccaaagaagcagaagtgttggattatatagatggagggggagcagcagaaggaggaaaggacagaggtgactccaagctggctgtaccaaccatgaggaatggaagaaagtttgggacaggtaccatcactgagcacctactacatgctaatctcctggttctatactttttatctcatttaaaccttataatgagcctatgaaggaggatatcagtatctcttttttttttgagacggagtctcgctctgtcacgcaggctggaatgcagtggcacaatcttggctcactgtaacctccgcttcctgggttcaagggattctcctgactcagcctcccaagtagctgggactacaggcgtgcaccaccacacccagctaattgttgtatttctagtagagacggggttttgccatattggccaggctggtctcagactcctgacctcaagtgatccgtccacctcggcctcccaaagtgctgggattacagacgtgagctaccatgctcggccagtgtctctgttttatagatgagaagatggaggcttagagttggtaaatctgtggtacctctgggttccgtagtttgaccctctgcatcagtagtccattgctttattgttttttaatcatttacacatctaggcatgagtaagggtgagtgggctaatggttggctggggaggagctgaatgcgagtaggaagttatccagaagcaaaactgccacattgaggtgatgcatgatacagactgcatgcgtgactgcgcctgacactgttctgcttcagtgaacaggtatattttagcattaaactggttgaaataaaggtaaagatcattgaaaatatatttttaaaataaatgttttagaccatattccatgagaaatccagaattggatgccaaagaagcaatctctaattatacatgacctccttccagggactctttataccaaggttatgttctacatcatttcagactcttgcctctttatgtttaaagcaggatatataaatctgcagcaaattcataaggtaacaacattcttttggacaaggcatagcctttgacaatattttaagaacacaagtgacagcttgagtatgtgggacctattaaaatgtatagctttgacttttctgtcttccagagctgaaaagggtgttatgatattaattaaatgagtcatattcttctcttttttaattagattctctctaggaataattcatcaccatagaagtgtattgagtgtgtcatccagtaaaagtctaaaattttactttacgtttttaattttgctctactattattttctgcggttttggctatgacaatgctttgtcacttggaatagtttaagttttgcttactaatggcttgatatacactgaaaatagcagtgtttcccagtttgacttttcagaatgagctatagcagggggaagtggttacttgttgagttggatctggagccttcctctgatacattttactaagtgtttcttagactgcttaagaattttactttgcttggtgaaaccatttgactttactttttcccttaggaaaactatgtttttctcccaataattaagttttatcgtaggtactttttgtttgttatccacattagcaaaagaaataactcctcccacccaaagaatggcagattggtgtgacgtggttatgcaataaactaacagtaaattattttgtgtaattctttgctgtattaccttctctatctttgtttttattcctttaagaggtaactagagagccagtagatactacacgcaatatttcctctactttgaattttaaagattgtgtattatattgcagttcctgaaataatttcatattaactgaaaatagcattggacaatactttcctatggctgaatttttttttttatgttttcaaccttgtggtgtcttcccacaattaggaaagtattccgtatgaatacagctgaaagtgctgtggtttcctccctgttcttcagccttgccctcctctgtttcaggatctgtgttttctaacctagctgccctcaagactctctctttggttcattctcctaaaaagccccttcctacccttcttctacagagttctatatgttaaatcttcatttgtatgattgcataatttttgatccactcagtcgtcagcctgatggtttggttgatgggttggttttgttggtatttttgttttttttttttgtcatccagaaatgctttggagtctccatctcgtttccttaagtcatgctgttttcattatgactagctgagatttttttcccccactaatactcatagcaaggattaaatggttaaggaaggaatgatttttaaactcagcagtcaacaatttggagtttccttatttgtagagaaatcagaatatgtggtataattcattcaaacacattcctgctagaataaatccattaagttgtagatttttttttattccaatgtgcttggtgtatccttaatagtcatttgcttcccagtgaattgtttttctttccagaacctatgtcagaggaaatttactagaagttaccaaaagtgattatgtaaagaatactgtcatacaaagtctcttaaagtgaacattgaaaaatcagtccatataaaacactgatttaggtcttaggggctttcaaggaattaaacctagcccttactatcgagaactttaaaatctccaaagctggccgggtgtggtagctcacacctgtaatcccagcactttgggaggccaaggcaggaggatggcatgagtccaggaatttgagaccagcctggacaacatggcaaaaaatgttaaacatgtggcattgaggccgggcgtggtggctcacgcctgtattcccaacacttttggaggccgagacaggtggatcatttgaggtcaggagtttgagaccagcccagccaacatggtgaaaccccatctctactaaaaatacaaaaattagccgggtgatagtggcgcaggcctgtaatcccagctactcgggaggctgaggcaagagaatcgcttgagcctgggaggcagaggttgcagtgcgccaagattgtaccactgcattccagtctgggcaacagagtgagaccctgtctcaaaaaaaacaaaaaaacaaaaaaaacagtggccttgaaatctttatccaggtaaaaagcaatcgtaataataacgaaaaatgttctaatttgaaagtcaggcacaagtgcagtttgaaacctgattgttactaaatgaatttagtctatcctaaaagctatttctcatgtctacctgtgttatcagaagaaacaacagcattctagcatcctgatatcattctagcattgggatgaaacgttgccatcctaggagaagacatgggttcttatggataaacgacttagccttcagccagctttagcagtgtttgggagcagtgtacagacatgcaccatttcccaccttcctctgtgaaatgctgcagtattatatggtgctttgaaaacatgccctgctggagtgctttgggaaaaaatagcctgtttcaaagtttcattaattatagtcatgtaaaacaactgattgcctctatcatttattttaagaaactttcctaacaaaatagccctccgtctgcctctgtagtgaactctgtggacaaggacattaaatgactgtgcattaaaagttacatcctttctcaccgcctgcctgtttgtgtttcaggcatcctgacaaaaacaaagatcctggagcagaagacaagttcattcaaatcagtaaggcttacgaggtatcgtgtccagctttgtgatgcatccattagctcttacaaaatatgccttaggaggtgatgagttttgtaaagttgtcagaaaggtcatgttccccatgcccttgatgcagtttctagattataatagagagaacaggctggatgcggtggctcatgcctgtaatcccagcactttgggaggccgaggtgggtggatcacgaggtcaggagttcgagaccagcctgaccaacatgctgaaaccctgtctttactaaaaatacaaaaaaaattcgccgggcgtggtggcacgtgcctgtaatcccagctactcaggaggcttaggcaggagaattgcttgaacccgggagtgggaggttgcagtgagcagagatcgaggcctgggtaacagagggagaccgtctcaaaaaataaaataaaataaaaaataatagaacatatttggccacatccagtatattggaacaagtgcctgaacacttcagctcttggaaaaactggcctattttaaaggctttaactagaattgtagaattaccctgagtatgtctgtatgtgtcactattgccttcttagaaatatgcattaaagaatcacataccaaatcgcctatatttattaaagtggcacgaggtaacaaatacatttaaacacaagattttcagtaattttccagtatgtcagctcaagtagattggtctggaatatgcatcaaagagaattcagtggctttctgatttgtatagggaatgcccttcagcagacagtgcttagctcatagaataacacgtcatcattctaaaacagattcctgaattttagacttcaaagttattttgtaaaacaaagtaaattaacagacaaggcactagactatagctatttggtgttcatagcttttcttatcttggtttgaattggtccaactcaccaggtatgaccaggtcaattttcttgtcattgagccctggtgatcaacattatgttattttatttgttttgctgaagtgtttaatgttgtggtagtttgaaatctttaatgccaagatgagcatgagtacctaaactgaaatattttagtcttgaatgttctttaatgtttctctagtgaaagaagagtttctcattcttttgaatgactgcatttagaatatctaatcggctggacccagtggctgctcacgccctgtaatcccagcacttggggaggctgaggcatgcagatcgcttaagctgaggaattcaggaccagcctagacaacatggtgaaaaatacaaaaattagccaggcatggtggcatgtgctgatggtcctagctactcaggaggctgagatggaaggttgaccctgagagatggaggctgcagtgagctgtgatcacgccacttcactccagcctgggtgacagagtgagactctatctcgaaaagaaaaagaatatctaattatgtcataatcttttttcttttttcttaagagacagtctgtctctgtcacccaggctggagtacagtgatgcgatcacagctcactgcagccttcaactactgggctcaagcaatctcccactcacctcaccctcccaagtagctaggactataggcacgcaccaccatgcctggccgatttttttttttctttttgtagcaaagtcatgctatgtggtccaggctggtcttgaactcctggcttcaagggatcctccaaaccttggcctcacataatcgtgtcataatttttacatttcttttcttttcttttcttttcttttttttttttttttttgagacggagtttcgctcttgttgcctaggctggagtgcagtggcaccatctcggctcacctcaacctccgcctcctgggttcaagcaattctcctacctcagcctcccgagtagctgggattacaggcatgcgccaccactcccggctgatttgattttttgtatttttagtagagacggggtttctccatgttggtcaggctgatctcaaactcccgacctcaagtgatccacccgcctcagcctcccaaagtgctgggattacaggtgtgagccaccacgactggctgcatttattttcttcctatgtctttcaagctgcttacaaaaaagtcttttggatgaaccttttgttgttgtttagatttttttcttcctttatagattctttcaaatgaagaaaagagatcaaattatgatcaatatggagacgctggagagaaccagggctaccagaagcagcaacagcagcgagagtatcgcttccgccatttccatgaaaatttttattttgatgaatccttttttcacttcccttttaattctgaacggcgggactcaattgacgaaaagtatttattgcacttttcacattatgtgaatgaagtggttccagatagcttcaagaaaccctacctcatcaagatcacctccgattggtgctttagctgcattcatatcgagcctgtgtggaaagaagtcattcaagaactggaagaattgggtaagataattttattcactgaaagatatttatatagatgactttttttttttcaagatggagtcttgctctgttgcccaggctggagtacagtggtgtgatctcggctcactgcaacctccacctcccgggttcaagtgattctcctgcctcaacctcccgagtagttgggattacaggcacccaccatcacgcccagctaatttttgtatttttagtagagacagggtttcaccacgttggccaggccggcttcaaactcctgacctcaagtgatctgcctgcctcggcctcccacagtactgggatgtcaggtgggagccaccatgcctggccccaaagcaggttttttaaattgcctattctataaaccctttttgaaaatctttcttaaatgtattagtctgctttcttcaactctgtgactccgaagcaccaattttttacttattgtgagctgagccttgaagggggttggaagtcagctaaggaatcttcagtcacacactggtaaaaactagtgtgtaaaagcatccagtgtttaaagagaagtgtgctgtggaagagggcccagaactagcaccatccctgaccttgagttcaccatttggttgaagagaaaatatatacacagagaattaacactgacctcacatttgcaagcacagaataatgttttactgaaggagtagacaaagatgacaagaaattccttctgtattttctaactccttgcccatgaaacagataccttcgtttgaaacttttttctcagtcaactttcatgttccaattactgtattagacactaaaggatatataataataataatttttattgaacatttcagttcccttgcattgtggtaaatgctttctgtgcattatttttgtccccagagcaactcaatgaaggagagactattattatctctattttacaggtgagggaactaaggcattgaaggttaaggaactaattcattattacactacccataagcatcagtattgggttggacccaggagtctgaccgtcttaaacactgcgcgcgtactgcttcagaaataagtaaatcatggtccttgtgcccaggaaactcacataagaaacatacctcaatcatctcagcacatttagtgcttgctggaaggtgcaggcagagctaccagcgtggcccagaagttgagcatcttgaaatcaaatatcattttagggaaactcaatttggatgatcaggcagtgattacctgggtttggcaatttattcaccatgacttcctgtttaaaaagagagactgctgggcacggtggctcatacctgtaatcccaacactttgggaggctgaggcaggtggatcacaaggtcaggagttcgagaccagcctggccaacatggtgaaaccccatctgtactaaaaatacaaaaatcagccaggagtggtggcgggtgcctgtagtcccagctactccggaggctgaggcaggagaatcgcttgaacccgggaagcagaggttgcagtgagccaagatcgtgccactgcactccagcctgggtgacagagcgagactctgtctcaagaaaaaaaaataaaaagaaaaaaaggaagactaattcctggccaggcgcagtggctcatgcctgtaaccccagcactttgggaggccaaggcaggcggatcacctgaggtcagtagttcgagaccagcctggccaaaatgctgaaactctgtctctagtaaaaatacaaaattagctggacatagtggcacgtgcctgtaatcccagctactcgggaggctgaggcaggagaatcacttgaaccctggagttggaggttgctgtgagctgagatcacaccattgcattccagcctgggcagtgagcgaaactctgtctcagaaaaacaaaaaaaagactaattcctatcttttaaggatttctaagtatataagagtctcatactgtctagaaaaaaagtcatcctaaatactggcaaaaataacgcatttttctgctttagctctgtgttcttgattttgtttcatttcacgttattttgcatcttgtggttagtgtaccagcatgtttgtatttagccacattcgagtggcgtgttcttccagttggctctgtgccatcccctaaggcctattcaaaggtggagagaaaattaatgtgtatgtgcagctgaggggggaaaaaacttccctaaagggtgtgatatgtgtttaggattgcttagtgagagctgtttggcatctcaaattatgggtatgacagatgtttactaatgcacggaagaccctctcacagcctcagtatagtatttttaattcccgagggtgtgcagattagccagaagcatcaatttatataaacatcaaataatgtttctgaaataagtcacatatgcctttttattttattttttttttttatttttttgagacggaggctctctctgtcgcccaggctggagtgcagtggtgcgatctctgctcactgcaagctccgcctcccaggttcacaccgttctcctgcctcagcctccctagtagctgggactacaggcacccatcaccacgcccggctaatttttttgtatttttagtagagacggggtttcaccgtgttagccaggatggtctcgatctcctgacctcgtgatccgcccacctcggtctcccaaagtgctgggattacaggtgtgagccaccacgcctggcttttttttttctttttcttttaagagacatcattctgtcacccaggccagggtgtaatagcataatcatggctcactgcaacctcaacctcgtgggcttaagcagtcctgctgcctcagcctcccaagtagctgagattagaggtgcctgccattgtacctgtctttaaatatcttttcgggaagaaaaataccacaaattggccaggcatggtggctcacgcctgtaatcacagcacttcgataggctgaggtgcacagatcacttgaggtcaggagtttgagaccagcctggccaacatggtgaaatcccgtctgtgctgaaaatacaaaaattagccaggcgtggtggtgcgtgcctgtaatctcagctgctcaggaggctgaggcaggagaattgcttgaacccaggagtggaggttgcagtgagccaagatcgagtcaccgcactccagcctgggcaacagagcaaaactctgtctcaaaaaataaaataaagtggccgggcatgttggctcatgcctgtaatcccagcactttgggaggccaaggcgggtggatcacctgaggttaggagttcgagaccagcctgaccaatgtggtaaaatcctgtctctactaaaaatacaaaaattaactgggcatggtggtgtgtgcctgtaatcccagctactggggaggctgagacaggagaattgcttgcaccagggaggcagaggttgcagtgagctgagattgcgccactgcagtctggcctgggcgacagaatgagactccgtctcaaaaaaaaaagaaaagaaaaaaaccacaaatgtaaaacaccaaatatttatcattctttattctatttctccaaccacagcctcccacgtagctaggactagaggcacacacgggcatgcccagctaacttttttttagactcatcacgttaatcgtcacagatcccagagccagacttcctgggttcagatcccatcaccgtcacttgccaactctgtcaccctgggacttcacctctccatgtctcagttttcttataggtaaaatagagatggtgaagattggtcttaaactccaggagatacgaaagagatggtgaaggctggtcttaaactcctggtcacaagcgatcctcccgcctcagcctcccaaagcactggtattacaggcatgaatcaccgtgcccagccaacttttcagtttctaattcaggtttctgtgtgcgctcggtctggtataacgtatactgaatggcacagttactagaaaggcatatttcccaggatcagttcataaattggcattcaatctatatagcaatccctggtaaggtcatttagggtgagtcagtcactgagaaattgatccctctaatgttcagaacctggggcagaactggtcattggaggcagtaagaagtccaggctttgtggtcagctagaactagattcagatcctggttccactgcacacaaaccatgatgcctcaccctcccccagcttcagtttccttagccataaagatagcaatacttaccttgcagaatgattgtgagtatgaaaagtataatgtatataaagctctaggtgtgctaaagaaggcactcaagaagtgataatccctcccttgggcctttgtcttgtagccagttgacctccctaggtgatgtctcttctgtctttacgaatgaccaaatctcccaatgtatgtgcctgctttattctttttctttcttctgctcatataattctctgtatgcttccatttattgacattgttccatagttatttttaatgactgcagtgtgatatagtatactgtacttggctctagagaagagccaagaatccaatttggattcttgttctgcaattctgtcagctctgcaacctggaaaaagtcactttacctctctgaacctctctctgtatctgtaaaatgagggaagcggactatacaattcctaaggctcctcctttcctgcccttgagagactgcaacagtcaaagtcaggtagcctacagagagcttggtttagtctgctcagcagttttaaaacattaagtttgggatccctgccatttactcagcaatttcattttaggaatttactaattagaaaataagcgcacaagagcacaaagatgtatgcacaaagatgtatgtacaaagatgtacaaggatgcccgtcagcattccttataatgttaagaattaggctaaaagcaactttaatattgtgctttataataagaaatatatgtatattttggtgtttgttcccagttcctggcacagatctcctaacacccttgagattgcctgatcaataggggtgctaagataatcttttgctctcgtatttgatctttgactctgattcctgagatggagcacctaatccttggaatttcctgcaggatgggagcatcttttgttctattgaggcgactcttagtgggcccctgtgtgggagctggtcaccagaaaaaacaaaccatgattagaagtttgaaagtttcaccctcatcctccagaaagaggagaggggctggagattgagttaataattgatcacgcctgtatgatgaagccttcataaaaatccctgaactctggctcggtttcctggggggtgggctcagtctacaccacctcccctcagccaagcctacagtagagggcccaggcatcctcccgtatgggagaggcgtttgagtaaggagcctcacctggggtgtcctagcctcacatttactggcaaaaaaaatgaacatatatatatatttaatccctgaactactgggtttgagagttcccaggtggctgaacacatggaggtgcctggagggtggtgagccctgggagggcaggatgctcccacccttccatataccttaccatgtacctctcttccttctggctgatcatctgtctcctttgtaatatcccttatacctaatgagtaaccataaggaatgttcccctgagttctgtgagcagctcgagcaagttagttgaacccaaggagggtcatgggaccctttgatttatagccagttggttggaagtacaggacacaacctgggacttctggcgtctgaagtgggagcagtcttacgggactgaacccttcacctgcaggacctgatgcttcctctgggtagatagtgtcagaactgagttgatacccaattggtgtctgctggaggatttatggggaacccccacccccacagcgtgtggtgtcagaagggaagcattgagttgggcatagtggcacgtgcctggaatcccagctactcaggtggctgaggcaggaagatcgcttgagcccaggagtttgagaccagcctgggcaacatagtgagaccccatctcttacacaatgagtgtcagggaaagcattgtgttgagtgtgagtaggaaaaacaggttggtttttcctctctcacaacttcagtgtgcaacaataaatgaattaaatagattgatggcccagtttcagtgagctcctactatgtgccaggctctggtctggtgttggggatacatcagtggactacaaagggatccctatcttcatgaggcttacattctagaaggggagacagacaataaacaattgacagaaggaaagtgggtggtaccttagaagatggtaaacgctgtggaaaaagttaaagtgagcaggttgtgtgtggaccctgagtgtggggagtactgttttaaatatggtgccaaggtaggccgcattcaggacttgaagttggtaaagaagtcagctacgcagaagtcacggagatgcacacttcaggctgaaggaacagccaaggccctgaggcaggagcatccactgtcttcatagcacagcaaggacgctggggactggcgcaggctgttggaggagtggaagaagagggcatggggaaccaggggccaaacacaaagggtcttgttggcctctgtgaggattgtgcattttattccagctgaaatgggtctttgcagggtttgggcagaggagtgatgtgatccatttttatgttttaggaggagcagcctggctgctatgttaagaacagactgtcaggagacagggagaaatagggggagagcatttaggatattattgcagcaacataggcaggagagataatgatgactcagagcagggcatataatgaaagtgatgaaaaacagttgaattccagacattttctaaagagaaaaccaacaagacttgccgacagattggatgtggggtgcaacagataagagaagccaaagatgacgcttacagtttttgccctgagtaactggaaggatggagctgtcatcaactgaaatggcaaagacgtgggtaggacaggtctgtgggaggagattaggggttcgtttttggaaatgttaagcttgagaagtctagtagacatccaaaagaaaatgtacatttatcggcctttaatattgaatgtgtctccagtgttagcagagtaactggccctccaaatatatggttggatgaaagaacaagaaaagttgttcaagtattaagtgaaataagtatgagatgaccccattttgttttatgtatatgcatacacacacacacacacacacacacacacacacacatttgtaactcttcttacatattgccagattgctctacagaaaaactgaaccaatctagaattccagcagtgaaagaatgctagacagtctattaggaaagacatctcctatgaggtcgggatttcaatttcacaccaaaaaattacttagcactttttccagctgccatggagacataaaaaggcttcatttggatcttccattcttttcaggtgtaggaattggcgtggtccatgctgggtatgagagacgcctggcccatcacctaggggcacacagcacgccctctatcctaggaatcattaacgggaaaatctccttcttccacaatgcagttgtccgtgaaaatctgcgacaatttgtagaaagtcttcttccagggaacttggtggagaaagtaagtatctgtcaaggaaactatggctgagaagtagtttaagaggtacctaggactgttaattgcccagaacattttctgtagtcctctcaaacctgagtttcattgtgaggaaggcatgacacttattaattaattaattactcaaactaaatcgtttaagtgaagtctgtaggagactaataattgaaacagatgaagtacagagactgaaagaattaattcctattaatacccatcttgcagaacttacactgtcataggaatctgagcctaaaatgacagtgcctattttctaaacaaaaaaattaaatcacatgttagaaagaattagggatttctttctggctcataaatttgttcatgtgaagatatttgtctttatgcaaatttaattatatttggttatatgtttaacgatcatatctatggaaaatgccagattccatgaaatcaaatattatttttgaaacttcagaaacttacagtgacaataatatgaatgaatttcacaaagaaaaggttgaaatagagaagccagataaagttcacattggtctattatttccatatttaagcacctaatatgtttttttcaatatcttaatttagggatcaaagtaactaggaacggactctcattttgctttaaataattcattctcttaagaatacagggaaagtgaacataaaaaattttcatcgtatttctacatgtgctattcctagactgtcctactgggatcattatctataggagaaatatttgttggaattaacttaaaagtttgtcagagaatattggaggcttctaaaatggtgatagattgtcctgatagatcctcaaacatttacataaaatatctcttctgtgcccggcatagattaacatagccgtttcaagcagctcccaagcgggtggttatttccagtatgttggagcccatcgtaatgagttgggaaaggcttcctggcagaagtgacccttggaccaggttgggttgcaggcaggcagaaatctggagacatgaaatagcccgctttgtaagaagttttcactggtgagcagcagaggagggggatggagaggttattaggaatctccctgtgagggcctcagagcaccttcacgctcctttaaggaacttgggccttggcccacatggagccgttgtaggggtttgagcagaagagtgaaatgatcaaatttgagttttatataaatcattctagatgcagtatggaaagataaactttttttaacgactaagaaaaatttctagctagataatttattcatgtttttaatttctctcaggaatattttaagatatcagtggaggaaagtaacaattcagataacaataaatgaaattatataatgtatagagggggtggaccagcttatttttatttacgccgtttaaaaagagcaagctggcctggagtggtggctcatacctgtaatcccagcactttaggaggctgaggtgtgagcatcgcttgagtccataagttcaagaccagcctgggcaacatactgagacccaatctctacaaaaaatgcaaacattagccaggcatggtgccatgtacctgtagctccagctattcaggaggctgaggtgggaggatcacttgatcctgggaggtttgggaggttgagggtgcaatgagccatgatcatgccactgcactctagcctgggcaacaaagcaagaccctgtctcagaaaaaagggtgaggggcaagctgggagactgaggtgtgatagatagatgggagactgaggcatgatagatagatgatagatagatagataggtagatagatagatattgaaaggggcagttgtgtgttattttctgctggctagtatattaagaagtatactctgtaattaagcaagaaccaactctggaagctcagtttttataatatggtcagtaattgtttcagacaggattatgatttcagtctgtaagagttcaatgaaaatatgaaatcaatatcaccattcttttaatagctttagccaaatgaagacaaaaagattagttatctgcatttttattttttgcaatcttttacacttacttgatttgtttattttctcctgactggagtataatacaattgttaagaattaaatattgagactaacattctattttcaatttaaggttacaaataaaaattacgtcagattcctctctggctggcagcaagagaataagcctcatgtccttctgtttgaccaaacgcccattgtgccactgttatacaaggtactttctatgctaggataatggtttctttttcttttcttttctttttttttttttttttttagcagaaagtaatctctgagttggaacttatagcctatttgtcttttttgtaagaaacagtttcatccatgagaaatgtttgaagaccagaaattttacataaccatcatacattgagtactgattaatgccagttactgtgttagtgctttctatgcacatatcatgtaatcctcagaagaacccagtgatggagatactatccctgtttcttttttttttttttttgagacagagtctcgctctgtcgcccaggctggagtgcagtggcgcgatctcctcggctcactgcagcctccatctcccaggttcaagcgattcttctgcctcagcctcccaagtagctgggactacatgtgcgtgctaccatgcccagctaacgtttctatttttagtagagacagggtttcaccatgttggccaggctgctctcgaactcctgaccttgtgacccacctgcctcagcctcccaaattgctgggattacaggcatgagccactgtgatgggcttttttttttttttcggagaccaagtctcactctgttgcccatgctggagtgcagtggtgtgatctagactcactgcaacctccgcctaccgggttcaagcaattctttcacctctgcctccagagtagctgggactgcaggcacacaccaccacgctcggctaatttttgtgttttagtggagatggggtttcaccatgttggccaggctggtcttgcactcctgacctcaagtgatccgcccacctcggcctcccaaagtgctgggattaaaggcatgagccaccacgcctggccactatccctgtttgcatagagcaagatactgaggcttagagcagtcatataacccacccaagttctcactacagcatggtgagcgcgattcccactgacttcagacctgccctgtgaatgattcccccactacactcccagcctacctacactccccactacctctcatgtcactgtgacatgagacggagaggaaggtgttatcagtggcatggtcactgccatcttacctaattacggtacaggtaatccccaaactcatgcctcctgaccagtacagatttcaagaagatcgttattttgctttagctatgaaaaagaagagagttgtttgtatttactttgttggtacagtttttgcacatggaacaccatagaatggaagtatacaaggatacggaagacctagtggagctgtgtaagctggcatgtacctctctgctcagtgatgtgaaaaagccctacttgatttgtcatttacatctttgctgtagttttattttcttcctctctattatgccctaacagttgactgcctttgcatacaaagattatttatcatttggatatgtatatgtgggtttgagagggacggaagagatgacaaggcggtacaacatcaatatctacgcccctaccctcttggtctttaaagaacatataaacaggcctgccgatgttatccaggtacgtgagggtcaccttggttaagattttcttcacattttatcccaagattttatgtaaataaacagcaaaattgaacaaagtggctgaaggaaaggatcttccttcagatgcacaaaattttttaatgaatttttttatctaacttggtaccgtttgctttaaaatttttaatttaaaacgtttaaaaattttagcacctttaaagggctcctgttggaaaaccaacaatctttttccaaaatgaatttaaaagttaaatgtaaaacagtaataaaaaggaataagaagaagccacaaactaactgagagaatgtacagatgaatatttatctgatcttaaggtaggaaagggttaaaaagcattggggaaaaatcttggaaaatcttgataacttgactctaaattttatgtttttatgtaaatactttaaaatgtaaagttaaaaaactgggggaatatttataacaaatattaaaatgttgatatttttaatttctaaagagcttttaatcaagaaaatcataaaattctgagaagactaataaccatttttaaaaattaaatctcacaagtaatcagagaacattaaccttttttcacccatccaactgtcaaagattttctaagttaaaatagtactgttgagggtatagagaaacaagtactatcttgctagaggcagtccactctaatggcagctcaggtgtcctgtgaacacagaagggtacctgaaaccatggaaaccagatgggaaagtggaccgtaaagaaagaagagcaggtttagaaagataagaactttggctgtggacatactgaattagagctgcctgtaggaaatagaaggggagaagtcctttctacagttgggtataggaatcgagatcttaagaaaagcatacaggctggggatagaaactggtgtatcatcagtaaatggttagtggttgaagtcctgagtagggtaagatcttcccggcataataccgtagtctcccctgatccaccccacttacccctttttcagtttctgaggtttcagttacccacagtcaaccaggtccaaaacataggtgactacagtgcaagaagatattttgaagccgggcgtggtggctcacgcctgtaatcccagcactttgggaggccgaggcgggcagatcacgaggtcaggagattgagaccatcctggccaacgtggtgaaaccccgtctctactaaaaatacaaaaaattagccgggcgtggtggtgggcccctgtagtcccagctactcgggaggctggggcaggagaatggcgtgaacccaggaggcggagcttgcagtgagctgagatcacgccgcccactgcactccagcctgggcgacagagcaagactccgtctcaaaaaaaaaaaaaaaaaaaaagatgttttgagcgagggggaccatgttcacatcactttattacagtatattgttagaattgttctatttaaatattgttgttgttaatctcttgctgtgcctaattgataaactttatcataggtatgtgtataggaaaaaaacatagtttgtatagagttcagtactatgtggtttcaggcacctactgggggtcttggaacgtatcctctgcagttaggggatgactgctgtatgtaaagtaaggccaaggaggccaaggacaaaactcagaacagccaccggcacacaagacaagggggtgcctgatggagacgagaaggtgctgcaagtcaggaagaaaacaaataccagtgtccgaatagaaaagagaagataatctcaatccagggtaaatggatgaggatttcctaaattggtctttcggaacagtttatagttctgagaattatatttatttatcccactggggaaaattgtaaatcaaatacatttacaaaattattggtagaatggctgctttaccagcttgctctttgtggatatcaagtgtatgcttaacaaactcagttttcacaacagcaggtggcttaatgatcactagtagcaccagtggtttcctgttgctctaggtaatttgttgtcattgctatatggtatttatggccattataatttattgaatcattcttccgttggtggacattgggggctttgaggaatagtgttgcaatgaatatcataacctaagtacagagttctctaggacagcagttttcagaatgtggttgatagactcctggggattctcaaagatccttcaagagaaagtctgtgagatcatatcaagacacgatttgcctttttcactgtgttgacatttacactgatagtaccaaagcagtagtgggtgaagctgccagtgccagtgcatgaatccaggcagggcaccaggccacctaccatcattgtgtgcttcacccccaatcactcgcagcaaaaacaaaccactagattcacttcatgtattttgttttcttttgtttttggagacagaatctcactctgtcgcccaggctggagtgcaatggcatgatctcggctcactgcaacctccgcctcccgggttcaggcaattcttctgcctcagcctcccgagttgctgggattacaggcacctgccaccatgcccggctaatttttgtatttttagtagagatggggtttcaccatgttggccaggctgttcttgaattcctgacctcaggtgatccgcccacctcagtctcccaaagtggtgggattacaggcgtgagcctccgtgcccggcctcaccttatatctttgatgaagcagtaagaagtgttaattttattaaaccttaacccttgagtgcatgtctttttgatggatttaatattctgtgtgatgagctgggaagtgtgcataaagctgtcctgctgcacaacagagtacaaatgtcctgaggacaagtgcttaccttgccacttttcttaatggaatatcatttttacttggaagaatgacagacaactatggttatttagactcgggaatttggcagacattttctctaaaacagatgaagtgatgtggcactttaaaacaaacaactggtggtatttattgccagtgataaaattcaggcttccaagaacattagaatttcgaaaaatttgtactggccatcatgacagcttctcagaattttctgatgagattggttcatcaaagtgatgtggtttttttttttttgcttttgtttttgttttttagaggatctcactctgtcactcaggctggagtgcagtggcacagactcggctcactgcagttccgacttcctgggctcaagtgatccttctgcctcagtctcccgagcagctgagactacaggcatgcaccactggctaatttttttaaaaaattttttttgctgaggcaggcatatcatctgaattcaggagttcaagaccagcctggccaacatggtgaaaccccgtctctactaaaaatacaaaaaagccgggtgtggtggcatgcacctgtaatcccagctacccgggaggctgagacaggagattcacttgaacccaggaggcaaaggttgcagtgagccaagattgtttcactgtactccagcctgggtgagaatgagactctgtctcaaaaaaaaaaaaaatttttttgtttgagagacagggtctcactttgttgactaggatggtcttgaactcctggcctcaagtggtcctcctgcctgggcctcccaaagtgctgggattacaggtgtgagccactgcacccagcccgttctttttttaataagtataataaaatatgttggccaggcgtggtgactcaagcctgtaatcccagtactttgggaggctgaggcaggtggatcatgaggtcaggagttcgagaccagcctgcccaatatggtgaaaccctgtttctactaaaaaaaaatacaaaaattagctggcgtggtggcatgcacctgtagtcccagctattcgggaggcggaggcagaagaatcacttgaacctgggaggcgggggttgcagtgagccaagatcgcgccactgcactccagcctgggcgacagagtgggacttcatctcaaaaaaaaaaagttactgtttggaagatcagtggaccaatattcacatactctgcattcagatgaccagtgcagggtattatgaaataatacatgagtaaaagatccattataagtgcaaggaacacagatttcttcttttttttattttaatttttttgtttttaatttttttttaaattcttgtcaacaggaagtcatcttctcatttgtatatgaaccttttggatgccctcattatgatatgcctacctgttatgtgtctttttattattattatttattttttttttttttggagacacagtcttgctctgtctctaaggctggagtgcagtggtgagatctcgactcactgcaacctccgcctcctgggttcaagtgattcttgtgcctcagccttcggagtagctgggactacaggcacaagccaccacacctggctaatttttttgtatttttaatagagacagggtttcaccatgttggccaggctggtctcgagcgcctgacctcagatgatccgcccacctccgcctcccaaagtgctgggattacaggtgtgagccaccgcgcccggcctgtctattaagtcttttacccattttttaattagatatctgcctttctgtaattgatttgtaggggttatttatatgttcatctctttttttcctgtttttttctcatagtcttttgtttatctccgtggcaaatatcttcacccattctgtggcttgtcttttgttttgttttgtttttttgagatggagtttcactcttgttgcccaggctagagtgcagtggtgtgatctcagctcactgcaacctccgcctcccgggttcaagcgattctcctgcctcagcctcctgagtagctgggatgtaggcacactccaccacgcccagctaatttttgtatttttggtagagatggggtttcaccatgttggccaggctggtctcgaactcctgacctcagatgatccacccatctcggcctcccaaagtgctgggattacagacgtgagtcaccgcacctggctgtttttattatttttatgatactcacattttaaaattatttattgacatataatacacatgcagaaagatgcacaagtcagaggtgtgaagctcagtgaattctcacacaatgaacacatccatgttagcttcacttgatcaagaaacaaaatattgtcatcagcccagaaggcccctccctccccctacctacttacctccttcccaaaggtcagcactatcctgttttctaacagcatagattcgtctttgcatttttggattttatccaaatggaataatgtagtgtatatatcttgtatctggtttctctcagcttatgtttttgagattcatacatgtcattatttggagttttatcttcattcttgttgttgaaaattgcatggccaggcacagtggctcacacctgtaatgccagcactctgggtggtcgagacgggcagatcctttgagcccaggaggtcgagaccagcctgggcaacatggcaaaaccttgtctctacaaaaaatacaaaattagctgggtgtggtggtacacacctgaagttccagctacttggagggctgaggcaggagaattgcttcagcccgggaggtcaaggctgcagtgagctgtgttcgtgccactgcactacaacctgagcaacagagcaagaccctgtctcaaaaaaaaaaaagaaagaaaattgcatgataggaatagactatggtgtgtttgtccagtccattctattgttgacagagtttttccagtttttggttatttgaataatgatgccatgaatatattattgtatttgatgtctttttgatgaacataaattcttttagtatattcactcatatcaatattttcctttgtgattggttcttccttgtttctatttaagatatacttcccctacatcaaaaatcatgaaggtattcttctcatagagcttctaaaagctgtatagctttgccttttatatttaagtatttaaaatcatttggaatagtcttgatatctgatagaacaaatctcctcactttgttttttagatttggggaaaggttttttttccttcaaaagcattatagctgttggtcttttgtactttttgtatatattggtcttttgtactttttgtatacattttaaattctgtcaacttccatcaaaacaaaccaacccaaaaaacttactggtgtcttattgggtttagactgattgttaagtcggtttggggaggatagagatcgtataaaaggcaaagctatacggcttttagaagctctgagaagaataccttcatgatcttgatataggggaagtatgtcttaaagtgattctatccttagaaaattgggccttccaacctttgaacatgatatatctgtttcatttgtttaggtcttctgtaatatgtcttcataaattttataattttctctggaaagaacatttttttcaacttatttctaggtgcctcctattttttatcctattaaaaagcttttttttttttttttgatagtttatgctgcagaaaaaatttttttaaaaaagaatgtaggccaggcgcggtggctcacacctgtaatcctcgtacttttggaggccgaggcaggtggattgcctgagaccaggagttcaagatcagcctgggcaacgtggtaaaaccccgtctctactaaaatacaaaaaaaaagaaaaaaaaaagccaggtgtggcagcatgctcctgtagtcccagctactctggaggctgagacaggagaactgcttgaactcaggaggcggaggttgcagtgagccaagattgtgccactgcactccagcctggctacagagcaagactccatctcaaaaaaaaaaaaaaagaggccgggtgcggtggctcacgcctgtaatcccagcattttgggaggctgaggcgggtggatcaccaggtcaggagttcgagaccagcctggccaacatggtgaaaccccgtctctactaaaaatacaaaaattacctgggcgcggtggtagatgcctgtaatcctagctccttagaaggctgaggcagagaattgcttgaacccaggaggcagaagttgcagtgagccaagatcacaccactgcactccagcctgggcgacagagtgagactccgtctcaaaaaaaaaaaaaaaaaaaggtaaggccaggtgtggtggctcatgcctgtaatcctagcactttgggaggccaagtcgggtggatcaggagtttgaggtcaggagttcgagaccagcctgaccaacatggagaaaccccgtctctactaaaaatacaaaattagccgggcgtggtgttgcatgcctataatcccagctactcaggaggctgaggcaggagaatcacttgaacccgggaggcggaggttgtgatgagccacgatcgtgccattgcacttcagcctgggcaacaagagcgaaactccatctcaaaaaaaaaaaaaaaaagaatgtaaagggagccgggtgcagtggctcaccctagcacttttggaggctgaggtgggaggaccacttgagctcaggagttcaagaccagcctgggcaacacagtgagactttatcttttttttttttttttttaattttggaaaaaagaatgaagacagtatctttttgttgttttttctgtttgctggtataagtaatacagttgttggttgttttgttttgttttgttttgttttgttttaagacggagtcttgctctgtcgcccaggctggagtgcaatggcctgatctcggctcactgcaacctccaactcccgggttcaagtaattctcctgcctctcagcctcctgagtagctgggattacaggcatgcaccgcaatgccccgctaatttttgtattttttagtcgaggaggggtttcgccatgttggccaggctggtctcaggtgatctgcccgcctcggcctcccactgtgctgggattataggcgtgagccaccgcgcccagccttgattttgaaacaaaaactttgtatcatccagcaaccttgctaaactcttctattaacttaaataatttatctgtaccatcttttagatcagctaactatgtaatcatatcatctgagattaatgacaattttacttctttttttttccagccctcattttatttctttttctgacattactcctgacagctgacatgatgtggaatagaagtgtagtaatcgggggctgtccttgttcttgatttcaaagagagggaaggctttcagcatttccccaataagtgtgtttgcagaaggcttttaaaatgtggataccctttatcaggttaaagaaggtccttctactccttgttgactaaaagttctaaccacaattggtatgatttttatcaaatactttttctacatccattagattattctgatttttcttctttaatctatattgtgctaactcatattaattcattctctaatgttaaacctaacttgcactcatgaaataaatccaacaagattatgatttctattatgctttcaatatattgctggattccatttgctaacattttgcttaggactttgacattcatgttcagaaatgagattgacttctaacttttccttatcgtgatacccatgtgttgctttttctcttctcaggaagactttatgtgagattgtcttccttgaaagtttgattgaaagcatctgtaatgccatttgggccttgagcttgggtttctgggtttcgctttaaggaaagatttttgactactgattatttaggttttctgttttaacttctgcattgtaggtagtgattccttcttgtcatctttgagaatgattattttatgccttctcttttgttttcatggttggttttaccagaggcttgtcgattgtattagctttttcaaagaaccagttttgtctttgttaattcttcttcttatattaatatattcatttcttgtttcattaatttctatttttatctgtattatttcctttctacttttatatttttgctgtttttgacttgacagagatgtttatttcattaacttcttttctattatgttaattgtaaaattccccttcaagtactactttatatgtatctcagagttcttataaatagtatttttcatcagtcattaaagttcaaaatattttctaatatctgataggcgttcttgttttggttttttttttttcttttttagtcagtcttgctctgtcacccaggctggagtgtagtgatgtcatcatggctcactgcagccttggcctcctatgctcaagtgatcctcacccttcaacctcccaagtagctgggactacaggcacatgccaccatgcccagctaacaactttttttttccttttttttcttttatgagacagggtttcactcccgttgcccaggctggtatgctctcccagcctcaagcagtcctcctgcctcagcctcctgagtagctgggactaaggccacgcctggctaatttttgtacttttagtagagacagggtttcactatgttgcacaggctggtcttgaactcctgacctcaagtgatccacctgccttgacttcccaaagtgctgggattacaggcatgagccaccatacccagcccttttttttttttttttttttttttcttgagacagggtctcagtctgtcacacaggctagagtccagtggtgtgatcctagctcactgcagtctcttaagtcttgggctcaagcagtcctcccacctccacctcccaggtagctgggattgcaggcatgcaccaccatcatgcctggctaatgtttttttatttttagtagagacaagatctcattatgttgcccaggctggtctcgatcttctaagctcaagcaatcctcctgcttcggcctcccaaagttcggggattataggagtgagccactgtgcctggccttttgtttgtttgtttttaattttttgtagagatgggatctctccatgttgcacaggctggtctctaactcttgggttcaagggatcctcttgccttggcctcccaaagcatttgggttagaggaatgagcctccatacctggccgtgtttcttaatttccaaacataaagggaaatgtttacatttctggtttgcattttaaatggaattctaggttaattaccttgtggtcagaatacctgctgtcaatgatttcaatcctttgaaatgtgtgaaagttagcaataaaatggtcacacggttttgtaacctgccttttatactttgcaacattgttgctttgggatttatttttaattgcccagttcgctacaaatcctgaatggaaataattttgcctaaaattcaaaatgattgacttttcgttttgggtttttgttttgttttgtgtttggttttgttttgtttttgagatggagtctcgctctgtcgcccaggctaaagtgcagtggcgtgatctcggctcactgcaacctccgtctcccaggttcaactgattctcttgcctcagccttccaagtagctgggactacagacacacgtcaccatgcctggctaatttctgtatttttagcagagacggggtttcactatgttggccaggctggtctcaaactcctgacctcgtgatctacccacctcagcctcccaaagttctaggatttcagatgtgagccaccacgtccggccatgactgacttttttaatttgtcagcataaaacagtgaataaaaattctccagtggaaagtgtacttgattttccctttgacccgaaatagctgcatcattgctttcagccctgcattgctgaaatagatcaccacatgtttattcgctcaaacaggtctgtcttgtttggttatattactttagccaaggtcagctacgtttttattaagctggtaagtaaagaaagcccatctatttgcattgagaacactgcataaaatctagctgattcttggtttttctctaggcccgaggtatgaagaagcaaatcattgacgacttcatcacccgaaacaaatatctattggcagccaggctcaccagccagaagttgttccatgaactctgccctgtgaaacggtcgcatcgacagaggaagtaaggacttaaggctttgcctctgcttgttattacaatagaaggatcatgattcattttactatagggtgactagacatctgccctgtaacattgagaacttattcttcatttaacaaatactgggccgggcatggtggctcatgcctgtaatcccagcactttgggaggccgaggagggcggatcatctgaggtccggagttcaagaccagcctgaccaacatggagaaaccccatctctactaaaaatacaaaattagccgggcatggtggcttatgcctgtaatcccagctactagggaggctgaggcaggagaatcacttgaacctgggaggcagaggttgcggtgagccgagatcatgccattgcactccagcctgggcaacaagagtgaaactctgtctcaaaaaaaaaaaaaaaaaaaacactgattagtgactgtgatggtaatcatactaatatgatgtattagtccagggcactttagcaccaaattgtcagatgtgccagcctgtcctagtggtcagagaagatttccctaagatgtaacatttcagctgagacctgaaggatgagcacagtttagccaggcgtctgggatagactgggtcactttacagaagcacagaatatggaagagtgactgtccctactaaagcattccacacagggtgagtctttggaggtcttgggaaggagcaaggataacaattaaacagtagggaagtacagagtattgaggaaatggattggtgggaatcgggaaggctaagttacatgtattcaataaagtaggaagagttattatacaaagtatctaaaaagtctagaaattcagggaatgtattcattacaccttctcaggtgaatgaatcagtagctttaaatttagggctgtttcatctgtaaaaggtatctggatatggaaggaaaacatatcaatcatgtaacttgaaaatataaaacataatttccctgtgtgtctaggcttttcagattcctttatagtcttaagagcgaagaaaaaaatgacttaaatataaaaaaagaatatcctggactgtaaggattgttgtttacacagccttcaaaaaatatcccaaatccacacacttctcactttttttaaccactgccaccctggaacaagccaccatcgtctcccagcgagacccccctggcagccttctaactagtctctctgctccattccactcttgtaccctccaggcagatgtccacacgtcagccaataatgtttgaaaatgcaaatcagatccagtcactccccatcctggggtctttgcacttgtagtctctctacctgggatgctctgaccccatttcctgtcataacaatgtcaccttttcagttggcacttccctgaccaacctgtctgatggagcctggcttctacccactctggcctctctctgtccccttttcatctttttttttttttttaatatatagcacttgttgatacctgtcataatatatctgttttctgtcttccccactggaatataagctccatgagggcaataatattgtctatattacctgacatatactaagtgctcagtaaatatttttgggagaatgaatagctaaactttccattggaaccttgcaaaggaagccgttcagaatgaggctcagtggcctctggcctgagagagatttgaccagccctccctatactggaagaactaggacaaatagtttctaaaaggccctgccggccaggaacagtggctcacgcctataatcccagcactttggggggctgaggcaggcggatcacttgaggtcaggagtttgagaccagcctggccaacatagtgaaaacccgtctctactaaaaatacaaaaactagttgggtgaggtggtgcacgcctataatcccagctacttgggaggctgaggcaggagaatggtttgaactcaggaggcggagttacagtgagccgagatcacaccactacactctccagcctgggcgacagagcaagactccatctcaaaaaataaaatgaaaggccctgctgcatcagagattcagtgaccaaccccttaaattcctggcaggcacgatggctcatgccagtaatcccaacactttgggagcctgaggtaggaggattgtctgaggccaggagttcaagaccagcctgggcaatataaacaaaactatatatatatagttttcatatatataaaatttcatatatataaaattttaaaattcgtaaatgtggtaaagaagtttggtttgggaaaaacatcacagattgggaagagaaacagtttgttaatgacttggaaatcctcccttagttgaaatgtcagctttcactgggcacagtgtattcacttccataagatgagctcctcgtcttcttcaccttcacttgccattataggtgctggccctgccatcagggattggttataaagttttgtctttttgttgtgcaggtactgtgtggttttattgactgctgagactaccaagttgagcaaaccctttgaggctttcctgtcctttgccctggcaaacactcaagacacagtgagatttgtgcatgtctacagcaatcggcagcaggagtttgccgacaccttactaccagacagtgaggcgtttcaagggaaatcagcggtaagccacagagtctctcctcatcccaggctcttcataaccatgtggcacttgattctgtttccttcttccttgagagtgttgaatacagattctaggaaatctgaaactctgaagcctattttcaaagtctactcttttgtttttcctttttcttgatttttttttttttcttttgagacagggtctcactctgtctcccaggctgggagtgcagtgacatgatctcagctcattacagcctcgacctcccaggctcaagtgatcctcccacctcagcctcccacatagctgggaccacaggcacacacaaccacgcctggctaattttttgtatttttttgtagagatagggtttcgacatgttgcccaggttggtctcaaactcccgagctcaggcaatcctcccgcctcccaaagtgctgggattacaggcatgagccactgctcctggcctaaagcctactcttaaaacagtttttgacctggtctttttacattctggatgtcagcctcaggcccccacagaaaccatgttttctatcagtgaacggtaaaggtcatcagtgcttttcaccagttttttactaaggcaagtctggtcttgcagcatcctagatcctagattttacaaatccttaggccactggtaatgtgctctggaaatttctgcccccctctgcctctttaacttcatcctggttgatctctcctgcctttctcctgcattgtcatcacttcctacagaaacaagaaattctcctctgacttttcatcattttcgcaatcatggaaaatctctctaaaaaacaaaggtttccattaatattaagtcaaggttatagagcaaagtctattgagaaaaaagagctttaacttttaacaaaagcttaggaaagtcaccataaaagttatttcttaggccgaacgcggtggctcacacctataatcccagcactttgggaggccgaggcgggtggatcacttgaggctaggagtttgagaccagcctaatcaacatggtgaaacctcatctctactaaaaatacaaaaattagctggtgtggtgcacacctgtctgtagtcccaactactcagcaggctgaggcacgagaattgcttgaacctgggaggcagaggttgcagtgagccaagatcgcaccattgcactccagcctgggagacaagggcgaaactctgtctcaaaaaacaaacaactgggccaagtgtggtggctcacagctgtaatcccagcactttgggaggccaaggcaggcagatcacgaggtcaggagatcgagaccatcctggctagcatggtgaaaccccatctctactaaaaaaaaaaaaaaaaaaaaaaaaaaataccaaaaattagccaggcatggtggcaggtgcctctagtcccagccacttgggaaggctgagccaggagaatggcgtgaacccgggaggcggagcttgcagtgagccaagatcacgccactgcactccagcctgggcgacaaagcaagactccgtcaaaaaaaaaaaaaaaagcaaacaactgtaacttaaccatgcttttgaaacttctgatgttttttctctacttttcttccaggtgtctattttagaaaggcgcaacacagcaggaagggtggtgtataaaaccctggaagacccttggattgggagtgagagtgacaaatttatcctcttgggctatctcgaccagctgcgtaaagatccagctcttctgtcctctgaagcagtgcttcctgacctgaccgatgaacttgcccctgtgagcatcggggctgggaagggtgggacaccaggagggcttgtgagtacacagtgctggtggcggatttctgctcagagcagaggtccagcagcagcactgtgttgcagggtagagggactctcccttccggctttagtcctgaccatcatccattttctctctacataggtttttctccttcgatggttctactctgcttctgactacatctcagactgctgggatagcatttttcacaacaactggtagggatattgccaggctgaatttctttttctctgttaatactgatatcactgtttttcttttgaaaagagttcatcattattaaatttcaaggtacacttgatggggcaagtggaagaacgtttacacattttctattcccctttttctttctttcagtaacttcccttttttttattttttactttttttttttttgagacaaagtcttgctcttgtcccccaggctcaatctggggatcactgcaacctccgcctcccaggttcaagcaattctcctgcctcagcctcctgagtagctgggattacaggcacctgtcaccatgcctggctaatttttgtatttttagtagagatagggtttcaccatgttggtcaggctggtctcaaactcctgacctcaggtgatccacccgcctcggcctcccaaagtgctgggcttacaggtgtgaaccactgctcccggacattttttattttttatttttttttgagacagagtctcactctgtcactcagactggaatgcagtggcacgatctcagctcactgcaacctctgcctcccaggttcaagcgattctcctgtctcagcctcccgagaagctgagattacaggcacccaccaccatgcccagctaatttttgtatgtttagtagagacagtgtttcaccatgttggtaaggctggtctcgaactcctgacctcaggtgatccacccacctcagcctcccaaagtgctgggattacaggcgtgtgccaccgtgcccggccacttccctttttttatattggctgactgaccctttcccactggctaggaaaggatcacccatggctgccattctgggcagcagagcctgggactgtctcttcatcagggaacctctggtgcccagcacagggcctgacacacgtggagtccagtgtatagatgtaaaaggaatgagtgaattaacctcaagagggatacccactcccacctactgatgagaccatgagcccctgaaggacagaaccacatctcattcgtgtttgtgattcctggcacccaacacagcacctgacaaatgacagcctttgatgggtgttggtaggtacataaaatttcagaacaccagtcctagatgaaatcttgaaagatcaattttatctccctactccacccctctgggctacatctgaatttttctggccagaaaaaaatcagtaaagttgaggaaataattccacaatgtcagaaaattcttccatgtttacaccttaagtcctttattatcccttttattgtttcctcatgcagaacttattgagcatagcctattatactgagatacaaaatcaaacttttagaataagctgtctgtgaattagaacactgagcaatctctaccttcccctccaccacctccacccgccaagaaaagctctgtttgcctgaaattagtaagcgtttattggtgtgaagagtttttggtttgggatttttattttatctttttttagctggagagaagaaattttaacttgagctaatagtttgttaatttggttttaggagggaaatgatgcccctgctgtccctgatcttctctgccctcttcatcctcttcggcactgtcatcgttcaggctttcaggtaaatgtcctgtggcttctcggtgcaccaccatggttggtgttgacactttttttgtaaaactccttttttcttactttagcgactctaatgatgagcgagagtcaagccctccagaaaaagaggaagcccaagagaagactgggaaaactgagccaagcttcaccaaagaaaacagcaggtttctctaacaaaacaccagactcacctccccggcacctgccccccagatcctgtcatctgataacgcagcattggaacatagagtgtagagaagaactctcatgcacctcctcccatgtaaactgtggctacagggaaaagtcactgtgatttgtgtttactaagaccctgtaggtgtttagatgccttagatttcataatgaaggcagaaggaaagaagcctatcaggcaagtgttaggtgagccagaagcaggacgtggtttatccctgtaaatgtcaatgaacgtaaccagtcttgtgcgcacacacacccagcagcaagaggccagggtctccgagacaaagaacatagactgaatgatagttgtcttcttcattctgtcctagagcaacttctgcacctgaaaagcagcatcaagcagggcacagtggctcacgcctgtaatcccaagacttttaggaggcctaggtgggaggattgcttgagcccagggtttgagactagcttaggcaacatggcaagaccctgtctctacaaaaaacttataaaattagctggatgtggtggcaggcacctgtagtcccagctacttgggaggctgaggtaggaggatcacttgagcccaggaggtcgaggctgcagtgagccatgatcatgtcgctgcactcaagcctggaaaacagagcaagaacctatctcaaaaagaaaaagaaaagcagcacagaaaggctgtttgtaggtcagggattaccaagtcaggccatccccatcctaccaatgtgttagactcaagaatagtgaataacatacctagtctggttagaacatagcattttctttcagctgtttcttttcaaagtaacggctttccccctatcctgacagcatcttaactcctcaatatttctccacagcaagattcctaaaaaaggctttgtggaggtaactgaactcacagatgtaacatacaccagtaacttggtacgtctgaggccaggccacatgaatgtggtcctcatcctgtcgaattctaccaagaccagcctactacagaaatttgctttggaggtctacacatttactgggtaagcatgtgtgtgtgtgcatgtatgtatgtgtgtgagagagagagaggcaggcacactgaaattgcacgcttttctctttggtcttgtggggcttcatccatacagcaagatgctggctgtgacctttccaatccagacatctgagccattgcgacagggacctcttttcccacttcacttcgtgttttgttggttctgaacagaaaagcttgaactcagtgttattccctgagccctttcagttactgttctctagcccttgtgtattttccagaagagcaatgttaagttccaccgagcaagcgatgggggaatgggtgattgaagtgtcgcagctgctggagaggcactggctcccacagaaggccttctttttctctgtgttcaggccccatccaacacaaagcgttttcctattattttaagtctcactggggtatttattttctcagcaattaaatgtgtcaggaaatgccctgagtcctcaattctcttcttcctacaggagcagctgcctacacttctccttcctgagtctagataaacacagagaatggctagaatacttactagaatttgctcaagatgcagctccaatcccaaaccaatatgataagcatttcatggagcgtgactacactggttatgtactggctctgaatggccacaagaaatacttctgcctcttcaagccccaaaagacagtcgaagaggaggaagccatagggtcgtgcagtgatgttgactcttccctctacctgggtgaatctcgagggaaaccttcctgtggccttggatccaggcccatcaaaggaaagttgagcaagctctctttatggatggaacgcctgctggagggctccttacagaggttttatatcccatcatggcctgaactagactgagaggattttccaaagagatttgaactcttcagactttttaacatgcccctgtgaacaggtattttcaggactcaaactaccacaatgaacagagtatagattttagattgctcttctagaaccatggctagaagaatctttcctttgtcctgttctaacctaggaatgaaaaacaccaccagtttgaatcgcctagatgaaaatcttttcctctgggtgttatttttccccactgaatgccacaccattgaaaatagactgctcatcccctcttcctttcttgtccttgtcccatgctcaccccaccctcctgtcctgtgtcttggagaagcacagggctccaccctgcaagcggcatctggcggaccctcatgagcctgtcgtgcaggccaggtcattggccccttccccaatcccggccctgctgtgctgctgccatggcgcatgctcctaactctgaacaacccacggcagcttctagccccgcatctggaaaaaggcccctttccaagcaatctcacgtttactggttgttctgggagtaagtggctaaatgtatattttgggggtatcccccaacaacagtttgttggccacaggttgaaaaggaaaggaataaacgggagttctgcatgtgagttctcaagaaaaggaaagggaggctgagcagtggctgaagcgatgcagccttgagacacgctgtgagcatcccatccgccgccccagcgctgctggtagccaggggaggggtctgcacagcgagaagtactgtgatgactttgagccgttgacatgtatgtcttcagatgcctttctgcctctgtcgattttagggtatggatattaggagccataacttgtaatcttgttctctgaacgtagagataagctgctataaagccagtagatgttaaactgaagagaaattattcccacctgctatgagtcaggcttaaggaatctcttcaatagtgtctctttagtaaaataccaaacatgtctttgtatcaaggaacttaaaatttctcaacaattgtattttgaacactgttaccctaaaagtgctgtctcttcaagtcatcttttgcaggaagtgagccaagatttgttctagactcccattttgcaaaaggcttactttccacttctgggctgtattttgatgtctcatcttcattgttttcactcttaacttagagctgcttcaccagtattggggtcagactggccatcagcacctgagcgtgctgagctccaggtatagtggaccccagggtgcctcataccagccagttagagagcataccttttatttttcagggcagaatgaccagtggttctgagtttgagtttggacagcttcaaagagtggtccgttcaaatgtcaaagcaaggtgcctttggtggctttgtgaagggtgaaaatcagtgatgggacatttactaagtatttctttttttttttttttttttagttgttgagacagagtttcactcttgttgcccaggctggagtgaaatggtgcgatctcggttcaccgcaacctccacatcccaggttcaagtgattctcctgcctcagcctcctgagtagctaggattacaggcatgtgccaccatgtaattagcccggctaattttgtatttttagtagagacgggatttctccatgttgatcaggctggtcatgaactcctgacctcaggtgatctgcctgcctcagcctcccaaagtgctgctgggattacaggcgtgagccaccactcccggctaagttagtatttctttaatcttaatgctttaaactaagccacttggatcctgaataatttaaatcttgagctacattggtaagtaataaattatttaaggccaggaattcctgtagttttcatggagtctgtagctttattaaaaaataaatcactgccaggcttcattcttccatatgatcctctaaaaatggacacttcctctgaatgctgtatctcatggcacctggtccaactagaaatggtcaaggaattcatttggctccttgatacatcagtcctcaatattactttctaggtattttatggccagattgcttatatgagtggtcttttggtttggtagtaggtttttatttttaatttctgtactaatgaaattcctgactttaatttctgaaaaccaaaaactctccaagtgtatttatttatattttttttaatagagacgaggtcttgctatgttgcccaggctggtcccaaactcctggcctcaagcagtccttccaccttggcctcccaaagtgctgggattatcaatatgagccaccatgccagatttgttcatttttaaacatttttatctcttcaagtcatcttttgatcttttaaaaagcaccttcaaacagctgcaccttccatttgcactaggaaatgaaggtagtgatgggattggcaatgttcctggcagatgtttcagcccaaaagctcttctacagaccggtttagagctggtgccctatgagaatattagggagcttttattttaaattgaactttacccttgtccatgcaaggcattcctcctgaatgcatccatgaatttgtttacttttgcgtcaaacatatgagccattgtcatgctcagcctgtgccaccattgctctgtctgatgtatgtaatcatacaagacctgattttggttctaacacagtggtctttgactatcaacattgatgtttttagagatgggttcttctggttgatacagactatgcattgcgtttagcagatggggtaaaactggcctaaaacaagtctttgcagaatacatgccaatttccaaaaaaaaaaaaaaaatttgttgctcaggtgttgcacaatttttatctaacactgaggctatcagctccaactaaacaacatttcagtgggtgaggctgccctaacttccattaggggccatggtctcactgccatcacttattagccatgagaatttggttgtagttttcaggtaggttggtttcttcctcatttgcagcttgttgatacttgttcctttttatttattaacatcccaatcaatttgcagctgccatcattacataaatatttttctgttataaaaagaagtgtgatctgtttttttagtgatttcctttgtttgggaatagagattggaagcacatactcagacctgttttgttaactagaattctttaaaagctgatgccaaacatctttacagaggaactgtagttcacatccacctgtctgacattgtcccctaaaaacaagtgcagtgtggcagctgctgaatctgtctgttcagtttgtcaaggaggataattatgcttgggagagatctgaaaagaaggtgaatattttgcacttttgatactcttaggaacaaataacttatttggcaaattgtttcttttttatgttttgggtgttgtttttgttttttgactttttttgtattgtgaacaggcactgaagctgatgttattttaagattacagaatggaaaaagaaataaactattttaatgtctgataattatggggtagcccttgcattgcaagatgatgatttgattatggacacattatcaacagaattgaatttgcatggaactcaagacacgcttaagatcaccacagcataactgcagatttcaggaattacagtcatagagggtacatcaacttgaagagtagattgagtcttacaggaagtgagttacaataagtaacattaagagcccagctgccagcctggccaacatggtgaaaccccgtctctactaaaaatacaaaaattagccgggcgtggtgacgcatgactgtaattctagctactcaggaggctgaggcagcagaattgcttgaacccaggaggcggagattgcagtgagctaagatcgggccactgcactccagcctgggggacagagcgagactccatctcagaaaaaaaaaaaaaaaaaaaagcccagctgacattttccagttttgttttgttttctggggtttttttgttttgttttgttttgttttgttttttagtagagacggggtttcaccatgttggccaggctggtcttgaactcctgacctcaggtgatcctcccgcctaggcctgggattacaggcgtgagccactgggtccggcctgcttttttttttttttttttttttttggagacggagtctcactctgtcacccaggctggagtgtagtggcatgacctcagctcactgcaacctccacctcccgggttcaagcaatgcccctgcctcagcttcctgagtagctgggactataggcacgcgccaccacgcccagctaacttctgtattttcagtagagatgggttttcaccatgttggccaggctggtctcgaactcctgacctcaagtgatctgcccacctccgccccccaaagtgctgggattacaggcatgagccaccgtgtccagccttaggttttctagtttagaagacattttgtgtacccttctaggcctctgagcaagaagtttcttcattaggctctccgtgttactttatactttttacttacgttcacagtggtcctaaaaccaagatgcagccctaagcacctcataggagaagctgtattttttttttttttttttgagatggagtcttgctctggcacccaggctggagtgcagtggtgcgatctcagctcactgcagcgtccgaggaggagctgtagtttaaaggaagatactcaatactctaggaagcagatcatcaaaattttaaaaagcggctgggtgcggtggctcatgcctgtaatcccagcactttaaggaggctgaggcgggcggatcaccttaggtcaggagttcaagaccagcctggccaatgtggtgaaaccctgtctctactaaaaatacaaaaattagccaggcgtggtggcaggcacctgtaatcccaggtactcaggaggctgaggcaggagaatcgattgaactcgggaggcggaggttgcaatgaaccgagatcatgccattgcactccagcctgggtgacaagcaaaactctatctcaaaaaaaaaaatgtttaaaaggaagatatagaaatatggaatgcttatacagtattatttcatagtttttttaaatgtcatgtttctaatgtttagataatcttgaaagaaattctcctcacttcccctttatcctccatctttcatcaaaggaaaaaaaatcaaagcagtacaagtactcctttttttttcccccaattaatccaagttccttagaaatgttgctgtttgggtgagaattctactgattatcccgacttcacagccagcaatgacactttcagcagaaagttttcttggcataaactctttagttctcagactgcttactcataagttcttcttgagaacttgtcagcgacgcaatctgttttgtcttgaagagcacaagactcagacggttgtcactttggggagagcacatagcatctcaaacagcaggttagccgccagcagggctgtgttccctaagaaaaagtaaaacctcacatgaataccctgcagacgacccgctgagccaagccttgggactcctcagctttctcttccccttgtgcctccttttccagagccctgtcttgtgcacccctctagggtgcccgccagctgtgaacacgcttgcccaggctctctgcctccatcaagcatcatttgggaatcatattttaaaattcagaaagttctttgtttactctgagaacagatttttcccaaaggagaacctataataatgatgtgtactgtattatctatcctctgaggtcgataggcctaattccataagtttgtctacattaaaattattgggatggcgtctgctttgaagatcttaaccagctaagttcctatttgataaatattaacatatattatttatgctttagaattcactttgcaatgaaacatcaaaggagacggggattgggccaccctgtcactagactacaggctggtttctttctcttctgctgattggtgggcaagctaatgatacttaactacctcctgggggttttgttagggttaatgagctcatgtttgtaaggtgtgcagtaataggtgtgttttcttcaccattggacatgctcagctgcttccccaagtcatataagggactcatctttttttttttttttttgagatggagtctcgctctgtcacccaggctggagtgcagtggcgcaatctcagctcactgcaacctccgcctcctaggttctaagcgattctcctgccttagcctcctgagtacctgggattacaggtgtgtgccaccacacctggctaatttttatatctttagagagatggggtttcgccatgttggccaaattggtcttgaactcctgacctcaggtgagctgcccaccttggcctcccaaagtgctgggattacaggcttgggccaccatgcctggccccattttctacttattaactagcttcgtgtaatttaagctaccggctgcccatggatctcagtctctttgcttactcaccagaaagatcatacggtggtgaaacttcgacaagatcacagcccatcacgttcaggccttgacaacccctgatgatctccagagcctattcaagatcaagactgagttgtccacagtggtaatcatttacagtgaaaagcacccagtagagcttttcccagcccacgccaccctttgacttggaattggctttccctccataaacatttgttgactgccaggcacactggcaggcctcccagagaaacagataatgcgtacacagtccctgctcctcagggctgcatggtgtggtgatggagacaaggaaaccaatcgtttcaatgtcatgcaccaagggcttcaaggaaagcaagcccagaatggtatcagcataggtaatagcctggagaggtgggtaaggcttccccaaggtggaaatacccagttcaagggataggccaggcagagggaaaaacacaggcaaaggcaccaagatgggaaaagttcaggtagtaagatgtggccagaagacagagtaagtgagggagactgatgggaagagagtgaccttgtctgaaagggttcccatcctgcaggtgaaaagcccagaaggttgctaagcagagggatgaggaatgtgtttcagaaatccctcatgagaagagaggatggttacagccatttcaagagagagagttatggccaccctcctttaagatcttagaggatgtaaggtacttgattaggtttaagcagtcttcattcatttactctcaaatgtctttgagtgcctactatttgtattaggcactgtcctaggctccaaggacaaggtagggaacaatacataggtcctgcccttggggagattctagtcataaccattctgcccccgtgcatttactcccagcacacattattggagctttatttgggtgtttctaaaactcttgagcttaccttggcaggtaattgtgccatcacatgcacttttatttatttatttatttatttatttatttatttatttatttttgagacagggtctctgtcacccgggctatagtgcagtggtatgatcacggctcactgaaggcttgacctgccaggctcagttgatcctcctgccccagcctccctagtagctgggactacaggtgcacactagcacaccagactaatttttatttttatttttagtaaagatgggatctcactatgttgcccaggctgggctgaaactcctgggctcaaacgatccatccaccctggcctcccaaagtgctgaggatagtgcctgagccaccgcgcctggcccgttgtatgcacttttatttaaatttaaccctaaaaagataagtttagtgtttttgtttgttttgagatggagtttcactcttgttgcccagactggagtgcaatatcatgatctcggctcaccacaacctcagcctcccaggttcaagtgattcccctgcctcagcctcccgagtagctgggattacaggcatgcgccaccatgcccggctaattttgtatttttagtagaaatggggtttctccatgttaggctggtctcaaactccctacctcaggtgaaccacccgcctgatgccttggcctcccaaagtgctgggattacaggtgtgagccactgcgcccggccaagtttagtgtttttgtttggttggttggttggttttttttttgaggtggagtcttgctctgttgcccaggctggagtacagtggcacgatctcagctcactgcaacctccgcctccagggttcaagcaattctcctgcctcagcctcccaagtagctgggattacagacgcctgccaccgtgccgggctgatttttgtacttttagtagagacagggtttcaccatcttggctaggctggtctcgaactcctgaccttgtgatccacccgcctcggcctcccagagtgctgggattccaggcgtgagccacgacacctggccaagtttagtgttctttttttttttttttttttttttttttttttttttttgagatggagtttcactctttcgcccaggccagactgcagtggttctatctcggctcactgcaagctctgcctcccgggttcatgccattctcctgcctcagcctcctgagtagctgagattacaggcacccgccaccgcgcccggctaatttttttgtatttttagtagagacggagtttcaccgtgttagccaagatggtctcgatctcctgacctcgtgatccacccacctcagcctcccaaagtgctgggattatagacgtgagccaccgtgcccggccaagtttagtgttcttaagagaggatactataatgttgttcctatgaactgttgttttcatgacagatgaactgaaggcaggaagagcaaataaaggacaaaataagggactattatatcccagataggaaatgaaggcccttgccaaaatcaatcacccttcagtaagagggtattcaaacttatcctcagcccagagaacagaaaaggcctaggtgctctgctcttaaaatcctaccttggcagccaggcgcggtggctgacacccgtaatcccagcactttgggaagccgaggtgagtggatcacgagatcaggagttcaagaccagcctgaccaacatggtgaaaccccatctctactaaaaatacaaaaattagccgggcgtagtggcatgtgcctgtaatctcagctactcaggaggctgaggcaggagaatcgcttgaacctgggaggcggaggttgcagtgagccgagatcgcaccactgcactccagcctgggcgacagagtgagactccgtctcaaacaaacaaacaaaaatcctatcctgattcctaaagattcgcttcaagtcccaggaaaatgggtgttaagtgtctccacccccaggatcttcactggtggaatctccttacctgactaggagtgagaccagcaatttcaggtgtccctgtccctggcgcataggcaggatccagagcgtcaatatcaaagctgatataaatgggtttgcctcccatctgctgcctgacttcccccatcagaggaaccagcgacttcatccagcagtcttcagccaggactacccggaagccctgcagagacagggactgaggtttctgtctggcagcatttacagggcatttcctgtttgccagccccatgctcagctctgtgtgcacatgacacttgaccctccatctccatgaagagggaactatcctattttacaggtgaggaagggagggacaatgagtggtaaggaagcagggtcaaagctgactgatggagttggaatcagagagaagctttgctaaagcaagagtgggaaacagcagctcacgctagcaccttttgaattgctctgtccagaagactggccttggcacgctctaaaagcaagggatttgggtctgttccattggggtcttgtcatacacgtctatctgagagccattctgcctagagggtacgaggaccagaactaagaaggtggcaactcatcttgggtccggacttcctcccctcttttttttttcttttgagatggagtctcactttgtcacctaggctagagtgcagtggcgcgatctcagctcactgcaacctccacctcccacgttcaagcaattctcctgcctcagtctcccgagtagctgggattacaggtgcgcaccgccacacctggctaatttttgtatttttaggagagacggggtttcaccatgttggccaggctggtctcgaactcctgacctcaggtgatccacccaccttagcctcccaaagtgctgggattacaggtgtgagccactgtgcccggcctcctcccctcttctaagccagcaccgtccgaggggttggtcgatttctgcttgtctcccccgcccagcgatagacttcccatggcccataaaccaacttcctcactcctatgctccttatgcccctgatgatgcaaactcagccttgtatccctgcttcagacttgattagtaaagcccccgctcaatccctggctgccactggtgaggcaacggagaggaagacattttgaggggcaagggtggggggcattcggtctgtcacctggctccggttgtatctgtagggatccaaggtcgtggaagagccccggatgccaatctgcaccacacgcttacagtccaggagaccctcatccacacaccggcggaagggcgccccgtggtagagcttctctcctagggccttgtcggtcgtgtccgtgtgcgcatccacgtgcagcagccccactgggccatgcctgatgacaacagggcagctcagaggccaaccctccctgtggggccctagcacagccacccttcgggccaccaaaacttggtgacaattcacagccaaaaaggggagacctggcatccg

SEQ ID NO: 573 - DNA, 3122 bp, Homo sapiens
attctttcaaatgaagaaaagagatcaaattatgatcaatatggagacgctggagagaaccagggctaccagaagcagcaacagcagcgagagtatcgcttccgccatttccatgaaaatttttattttgatgaatccttttttcacttcccttttaattctgaacggcgggactcaattgacgaaaagtatttattgcacttttcacattatgtgaatgaagtggttccagatagcttcaagaaaccctacctcatcaagatcacctccgattggtgctttagctgcattcatatcgagcctgtgtggaaagaagtcattcaagaactggaagaattgggtgtaggaattggcgtggtccatgctgggtatgagagacgcctggcccatcacctaggggcacacagcacgccctctatcctaggaatcattaacgggaaaatctccttcttccacaatgcagttgtccgtgaaaatctgcgacaatttgtagaaagtcttcttccagggaacttggtggagaaagttacaaataaaaattacgtcagattcctctctggctggcagcaagagaataagcctcatgtccttctgtttgaccaaacgcccattgtgccactgttatacaagttgactgcctttgcatacaaagattatttatcatttggatatgtatatgtgggtttgagagggacggaagagatgacaaggcggtacaacatcaatatctacgcccctaccctcttggtctttaaagaacatataaacaggcctgccgatgttatccaggcccgaggtatgaagaagcaaatcattgacgacttcatcacccgaaacaaatatctattggcagccaggctcaccagccagaagttgttccatgaactctgccctgtgaaacggtcgcatcgacagaggaagtactgtgtggttttattgactgctgagactaccaagttgagcaaaccctttgaggctttcctgtcctttgccctggcaaacactcaagacacagtgagatttgtgcatgtctacagcaatcggcagcaggagtttgccgacaccttactaccagacagtgaggcgtttcaagggaaatcagcggtgtctattttagaaaggcgcaacacagcaggaagggtggtgtataaaaccctggaagacccttggattgggagtgagagtgacaaatttatcctcttgggctatctcgaccagctgcgtaaagatccagctcttctgtcctctgaagcagtgcttcctgacctgaccgatgaacttgcccctgtttttctccttcgatggttctactctgcttctgactacatctcagactgctgggatagcatttttcacaacaactggagggaaatgatgcccctgctgtccctgatcttctctgccctcttcatcctcttcggcactgtcatcgttcaggctttcagcgactctaatgatgagcgagagtcaagccctccagaaaaagaggaagcccaagagaagactgggaaaactgagccaagcttcaccaaagaaaacagcagcaagattcctaaaaaaggctttgtggaggtaactgaactcacagatgtaacatacaccagtaacttggtacgtctgaggccaggccacatgaatgtggtcctcatcctgtcgaattctaccaagaccagcctactacagaaatttgctttggaggtctacacatttactgggagcagctgcctacacttctccttcctgagtctagataaacacagagaatggctagaatacttactagaatttgctcaagatgcagctccaatcccaaaccaatatgataagcatttcatggagcgtgactacactggttatgtactggctctgaatggccacaagaaatacttctgcctcttcaagccccaaaagacagtcgaagaggaggaagccatagggtcgtgcagtgatgttgactcttccctctacctgggtgaatctcgagggaaaccttcctgtggccttggatccaggcccatcaaaggaaagttgagcaagctctctttatggatggaacgcctgctggagggctccttacagaggttttatatcccatcatggcctgaactagactgagaggattttccaaagagatttgaactcttcagactttttaacatgcccctgtgaacaggtattttcaggactcaaactaccacaatgaacagagtatagattttagattgctcttctagaaccatggctagaagaatctttcctttgtcctgttctaacctaggaatgaaaaacaccaccagtttgaatcgcctagatgaaaatcttttcctctgggtgttatttttccccactgaatgccacaccattgaaaatagactgctcatcccctcttcctttcttgtccttgtcccatgctcaccccaccctcctgtcctgtgtcttggagaagcacagggctccaccctgcaagcggcatctggcggaccctcatgagcctgtcgtgcaggccaggtcattggccccttccccaatcccggccctgctgtgctgctgccatggcgcatgctcctaactctgaacaacccacggcagcttctagccccgcatctggaaaaaggcccctttccaagcaatctcacgtttactggttgttctgggagtaagtggctaaatgtatattttgggggtatcccccaacaacagtttgttggccacaggttgaaaaggaaaggaataaacgggagttctgcatgtgagttctcaagaaaaggaaagggaggctgagcagtggctgaagcgatgcagccttgagacacgctgtgagcatcccatccgccgccccagcgctgctggtagccaggggaggggtctgcacagcgagaagtactgtgatgactttgagccgttgacatgtatgtcttcagatgcctttctgcctctgtcgattttagggtatggatattaggagccataacttgtaatcttgttctctgaacgtagagataagctgctataaagccagtagatgttaaactgaagagaaattattcccacctgctatgagtcaggcttaaggaatctcttcaatagtgtctctttagtaaaataccaaacatgtctttgta

SEQ ID NO: 574 - protein, 696 aa, Homo sapiens
ILSNEEKRSNYDQYGDAGENQGYQKQQQQREYRFRHFHENFYFDESFFHFPFNSRDSIDEKYLLHFSHYVNEVVPDSFKKPYLIKITSDWCFSCIHIEPVWKEVIQELEELGVGIGVVHAGYERRLAHHLGAHSTPSILGIINGKISFFHNAVVRENLRQFVESLLPGNLVEKVTNKNYVRFLSGWQQENKPHVLLFDQTPIVPLLYKLTAFAYKDYLSFGYVYVGLRGTEEMTRRYNINIYAPTLLVFKEHINRPADVIQRMKKQIIDDFITRNKYLLAARLTSQKLFHELCPVKRSHRQRKYCVVLLTAETTKLSKPFEAFLSFANTQDTVRFVHVYSNRQQEFADTLLPDSEAFQGKSAVSIRRNTAGRVVYKTLEDPWIGSESDKFILLGYLDQLRKDPALLSSEAVLPDLTDELAPVFLLRWFYSASDYISDCWDSIFHNNWREMMPLLSLIFSALFILFGTVIVQAFSDSNDERESSPPEKEEAQEKTGKTEPSFTKENSSKIPKKGFVEVTELTDVTYTSNLVRLRPGHMNVVLILSNSTKTSLLQKFALEVYTFTGSSCLHFSFLSLDKHREWLEYLLEFAQDAAPIPNQYDKHFMERDYTGYVLALNGHKKYFCLFKPQKTVEEEEAIGSCSDVDSSLYLGESRGKPSCGLGSRPIKGKLSKLSLWMERLLEGSLQRFYIPSWPELD

SEQ ID NO: 575 - DNA, 26071 bp, Mus musculus
  misc_feature (1)...(26071): n = A,T,C or G
gctcagggtaaaacacttagatgcacaaagcactgcctgcccaatcccagattgttcctgccttttagaccagccttttttcccctcccatcgttcttttttctctgtgtagccctgggtattctggaactcaaaagttgcacctgcctctgcctcctgagcactgggactaagggggcatgcagagctgccactacccactaagacttttctttcatgggaagaattttactcactcattgttggctaagtattaagaattgtaatgcaagggctgcagagatggcccagcggttacgagcgctgctcttccagaggatctgagttcagttcccagcaactacatggtggctcacaaccatctgtaatggggtctgatgccctcttgtggtgtgtctgaggacagctacactgtactcatatatataaaataaatcttaaatatatttttaaagttaggtattttttaaatcaaagtcaacctgatttagtgagttctaggccagccaggactatagagtgagaccctttctcaaaagcaaaaacaaaaaagactttaaaaagttgtcagtctgcgaatatagctcagagttccccattatgtaccccgttaataaaagttataatatgaaatttaggaatagataaagctgttacctgtattaaacacggttcaaatctatatgatacacttacttacatttaaaacatttgttttatttctaggctcccggggggctttctgtgaagtaagaccagatgataaaaggattctggaattttacagcaagttaggctgttttgaaattgcaaaaatggaaggatttccaaaggatgtggttatacttggtcgaagcctgtgacacttgttggtactgtgaactgtccaaaagtcccttaactccgccttgtggttggtggttgaggtcttcacacagttcagtgtctggagctggagcggcagcagatcagccagttgacttggaaacaaagatgactgtaaagcgcacccatcaccttctcagatgctcactggttgggagaagatagtattgctgcataccccgtgcagcttgtggtgtgctcctctttgggtcttgtgttagggtcagggcctcttacgtggggctctctagggagagattcttaaataaatggagtcagcactattttctgcatccagtgtggttgcatttctcacctaagagcaacgaagttcactctctttactctccttggtgtgctggatgaaatgtctctgttctttggagacatggctggaatgagaaatttagtgagtttcaatttgggcaatttttctgctttttgtaaagttctgggcaactgtctcctgtaactgttggttcaggccattgagctttgttagggacaaatgtgcatttgtttgtggccaaggcctaaattgacaaacttgtaaatctctgtatatagattagctgtaacccgactgttctttgtttactgttttatatattatggggtttttttttcctttgaaaatgaaaggtgttggtttaggatggcactttgaattatgtaaatcagtgaatggtagatttcctttacatctgtccttttcttcctaatagtttttatttttgaagtgcctcccacatagggttaggccatgactatttagggtatgagtacctaacttcttatgactcagatatgttgggaagtacagtaactcctgggaattaaccttaatagcagatccgcatgtgaaatgttctgacattgttaagtaagggtaaggggactgaccagtggtctcctttgcccttgaacagttgtcatttaatcgcaaagacctgttaactactggtttaatcgaatcagtccttaattcttgcatgtttgtatctaatttttaaaagaaagaataagtatatgttaacaatatgtatactttttcttttaatcagagattctgaaaacttcatgttattttaatttagatttggtgaatttaagggttttgagcatgaagctggcacatagtgtctgcaggattattattctttaatcatggctagctatctagtaacgtcatagattttcaacagtcttttgttaccttgctttcctccagttctacatagcttttgaactttgagctgaggggggagagagaagagggagcttgaaacattttcctttctagaactccagtgtgagcttgtgaggtagtcttttagcactatatagagtggacccagggaggcccaagaaccagaggcccaagagtgtgctgaaatgtgccgcctccttagggtgcgaacctttgcgataggatgtgctgtgaaacctaagtcaaggttggttttgaaggctggggtgaggggcaaaattgttactagatattaagaccgtttaatgttccttagcgttctgaatccatctcatgcctcagtgagaattacaaggttttattcagagcgtttcagagtttcatacggaatcaggaattgaacaagttgctttttgtttaatgttggctttcaataatcacatgggatgatcttctggacataagtgaaaacatgtccaggtctctactgtcattgctgtaggataaagtgctctgccatcttccatggttatgaatatttattaatgttggaataacatttcattgtttagatcacagctcagttcctatagaaaacgaactgtaaacctatctgcagaccatgcaagaggcacaataaaacttgaagtgaatgtgtgctgtgctgctttttctctgggttctccctttttttccctcacatctcttgatcccttaggtatccgaagctatttcagtgtaggctggattgaagacagccctgccctcctgccttccacagcaaagatttttctcagaaaagtacatttgtttttgtttttaagtaagttgctctgtttactacaggtaaaatttgtgtgaagttggggggggtgtcacagagttcctcactggaacatggcttcatctccttagataaaggaattttggtggtggagggggggggggtgggtcgcctaaagaggaggctgtactatgaacagtagttgatcctccacatctgagtttannnnnnnnnnnnnnnnnnnnnnnnnnnnnnnnnnnnnnnnnnnnnnnnnnnnnnnnnnnnnnnnnnnnnnnnnnnnnnnnnnnnnnnnnnnnnnnnnnnnnnnnnnnnnnnnnnnnnnnnnnnnnnnnnnnnnnnnnnnnnnnnnnnnnnnnnnnnnnnnnnnnnnnnnnnnnnnnnnnnnnnnnnnnnnnnnnnnnnnnnnnnnnnnnnnnnnnnnnnnnnnnnnnnnnnnnnnnnnnnnnnnnnnnnnnnnnnnnnnnnnnnnnnnnnnnnnnnnnnnnnnnnnnnnnnnnnnnnnnnnnnnnnnnnnnnnnnnnnnnnnnnnnnnnnnnnnnnnnnnnnnnnnnnnnnnnnnnnnnnnnnnnnnnnnnnnnnnnnnnnnnnnnnnnnnnnnnnnnnnnnnnnnnnnnnnnnnnnnnnnnnnnnnnnnnnnnnnnnnnnnnnnnnnnnnnnnnnnnnnnnnnnnnnnnnnnnnnnnnnnnnnnnnnnnnnnnnnnnnnnnnnnnnnnnnnnnnnnnnnnnnnnnnnnnnnnnnnnnnnnnnnnnnnnnnnnnnnnnnnnnnnnnnnnnnnnnnnnnnnnnnnnnnnnnnnnntgtacccaggcgacactcgctggctcttgcaggttgtgagctctccggccacacccgctccttcactttcaaggttgaggaggaggatgacacggagcacgtgctggcgttgaacatggtaaggggccgcagagggagttggagatgcggggggctagccgacactccgcctgtcgcccctctcctccaccctctggtccccgcatccggtgccactgggactaggccgattttggggtaagacgccttggctttggtgtcagccctccctcacttgagacgctgaggttctgcctgcctttcagctgtgccttaccgagggggccacggacgagtgtaatgtggtggaagttgtggcccgggatcacgacaatcaggagattgcagttcctgtggccaacctcaggttgtcttgccagcccatggtgagttggagccgttcattcctctcggagtctggtgggactgagaacttcggtattgatctccaagtgggtgggccagcacggctcagcctgtcattcttgtcttccagctcagtgtggatgatttccaactccaaccacctgtcaccttccgcctgaagtccggttctggcccagttcggatcactggccggcatcagatcggtgagaagagtgggccctctccactcccgacttaccccagtctcatctcctagtgtgtcctgcatctcaggctatggttccagtattctgtgcctcccactgcctccttcaggcctgggaacttgctgtaccctgcctgccccaggggtccaactccagcgaggtgggtgggctcttttccatctagacttggggactctgggagatgaggttccctgtcagcctagcagctgaatgagtggctctatccttgtgtatccaccagtttgtataaacaacgacctttctgaagaagaaagtgatgatgagagcgaagaagatgaaattaagctgtgtggcatccttcctgccaagaagcacaggggcaggccctagccccctggtgagtgtgtgggtggagggtggggtcggttggtgggattcccgaaggatctgggaagtttaggggcagcaggtgaggaggaagactctgacttcattcttgcttttctcagatcaggtaactgcttgctacaggtgccatgctccgtatgttcctggacaagttcaagaatggttttctcgatgaagagaatagggggtgggagggagggatggactgtggttcctgaggcttcccttttctattggggtgggacaacctttgaacacctcttctgacccacctaacccagattcagtccccagcactgcaaaaaaaaaaaacaaaaaacaaaaaacaaaagaacatgaagttcagaacacatttttaacactttgtactttttttgataaatatctaaataaagtggtgtacggttggttgttttgcaatccttgtgtggctttttcaatgctgagatgacatttccccagggaccaccaggtggcactgtggccgcacaaaggttgacctagctcttgagttggtgagatgtgggatccgattccccagggctttgggcccaaagcaggcctaagttcctcggccttgcttgcagaggggacctctcattccagcctgttccatgttcctgcaagtgggggagggctgtcacaggaggttatcagcttccaaacaaggggtctgggcctctgtcagcactcaggctgatgggcagggggacagataagtggacttaagaaacctgaggaatgcatctcgagccccatgaggggctaggcccagggagagggcctgtgaggggtggggaccagtctctgctcctttggtcttttgaggtaggttcagggcccttagaaacctgattcccagggccagatggagggaactggccagattgggtgacagggaaaccagaatccgggtggcctggcatatgggggcagaaagagcccctgggaatcaacctcggctgaggggttaccccccctgcccccagcactctgccatactgtcttatccctagaccgaggtggttcttgggcctgcctactgttatgccaggaagagaaaaaggggttgcttgtgtgaggactgtgcacccccggggtcagcagttcagcagtgttgatgggttgggatgggtggggatcagtgtcctacaaacaaacaaaaggttacttccccagacaagctgaagactgacagagaacagggcctgagattcaggccaattcacaccagctgaccaacaagtagggggctggtttgagttcaggccattaacttcaagagtgtcccctacagtagagaaagcggtacctaacccaggtgtggtagcacaggagacaagaaaatcaggaactggtatcccgcttgggcttcatggggtaggggttcctcctgactgtacaagtgttcccccatctatgcgaggaattaggggtaagttttcagactccctttttctcaagtgaaagatgcctgtctgtgtttcaggggtcagggtcgcgggtgccttttctagagtcccggaccttacctccaggtgtttccaccacggccctggctaggagccattagcagaggatcgaatgggaggggaaggtggaactagcgccctctggtgggcgtgtttaaaactgctcgtggtcgtacagctctatgtgggttcaatgatagctaaatttaaggcaggataggagggaataagtcacttaagttttgagtgcaaatgtgttttcgttcacacgaagcgcccatgctagaggagaggagttagttgggggcactcacttttcctgcctcctttcggctcctgccgccaactctttctcacgtgcgtgcgttaagtgcggccatctccggaaaccttccaaactcactcgcctagcccacgctcatactcccccaccatcagtgtaccccctgtgactccactgatcgcccattgtatttctggcctgttttcctggcgggtggacgtcgagcacagccctgcccgcagtgggagcccaatccacatttgccttctagttcaggagttttccccggccccttgcggcgccgtgcagacagacctgggaattgttttttccttctttccagatcacaccttttcgggatagcccttttctgcactctcggcacacaacaggagtgctgccaattatctggcctcagagaacttgtgcgatgtaggcatatgatggtgtctggacaatgctgaaagaaaagctacccgatatggggtatggggacagacacgaaggacaggacggcagctttctgtcttggttagaagcggctaacgcagttgcagagatttgcatttgaaccatcctgacagagtctgtgtcactttgaacgctgggcactggaggcgcgcaaggctgtgacctgcaggcatggtggcctgggtgtgaatctgaggggcgagtttgggtcccggcgaccgcgtgtttgcagagagagccgtttgtgttggcaaagagtgtgtgtttgtgtttgcaggagggagtgtgtgcatgtgtgtgtttgtgtttgcggagtgtgggggcggcagggaaaggtggccaggctgtcactcagagatcaggatgacaggcgctccctcatctaggcgagggagctctgattgcagattcgaggaaacaaaatagcaattgtaattacggggctttgataagataaaggaaggagggagctggccgggaggcaggctagccagggagggagggagagcggcctgcgggagcccgatggcacatttgcatctgtcagtcaccgcctgctctgggtgcccactgtgggggaggcacatctatcctcgcccccctcccaaagacaggacattttggggagaccagaaggatcctgaagagctaggtgaagctcttctgaatccataggagttttcacatgtaaaagaattctgtctctcagaagtgggaagcagagttcaaatgtaggagtaaaacctgggagacctgggaccttttggggggtggggggggagaggccgcgctggtgtccactgagggtgagggaggtgattcacagatggtgaatcaataaggttcatctctggaggctccctaaccctgttacaactcaggtgctcggccctacacacacacacacacacacacacacacacacacacacaccacacctgggaggaactaaaacccaggatctactgacagactgcttcctgatccctacctgtgtcttgtgactcaaacttattttcaaagtcttgtgtccatagtgaagagagggcccttccttttccaggggagcccatccttcgctttccatctgtttaggcatttactcgtcgatacactcaagaataaacactcctgagtatctcatatgctccacacatgaagtaaattctgtgagcaaacagatatcacctttgtcagcttgaagcaatgaaaaaaaaaaaaaaaaagacaagtcattctaaaggcccctcagcaagcacacagagaaagcaaggggttggcctttgtcaaccccttggacactggagtccgtctaccccatttcccccttcatgggcccactctccagtgggactgaaaagagctattgcctgccaaatcactgacagataaaagctaccatcggttggcaggtgaagccaccaaaggtggaagatagtctaatggctcagtcaggtggcccccatccatccatccaacactacctgcagagctacagctctgccctgagcttcaatccttgggcctgtaagacagattcctccctcacctccaggtctgggtggatcaaaacagcggggaacagaatttgtgaggagactcacctatgagctcaggaagtctactctgaggagggctgagactgtctccttggaaccagttcttctctatattgctcagcacttgaagggctgagatggactcccctaaccatatatatatatatatatatatatatatatatatatattactccgtgtttgcatttgcaagatgggatgcataaaaggggggcggcaggccgaaccggatggggactgacaagggcctgcttgcctctctttagcctacaaagactttctggggccaccgcaaacccctagttctaccccggaggcacagaggatcagtagaggggaggctgtggatgaaggcagagctgggtggtacatccacggagccacctggtcttcaaaaatacctggcctgggaaatctctgtgcctgcggtaacaaaatagtggctcagggttcccagaaaccctatggagaaagcaatggggcgacgggcttgaaaaggcttacagaagtctctaccttctcaccagcacctccctcttccaagtgacacaagacaccaggtacctgctcaaggaaaacctggaactcagaaggggaaaggctaggcagcttgggtccgtgtcctgaatgttgctgaacgtagttatttttgcccctgctaattgctcagaagcagtggctgtgggtccttcagagacccctgagctcttaccacatagacgcttcaaggtttttcttaagctttatagactagtgcagttggatggacaggagcaaggctgaaggtgataatggggtggcaaggggcatttctccctcccagagcctctttggagactgtgagacagaaaaccagcggggttgggtttttagaaaggtgaaggcaccgggttccagtggcgcccaaggggacgctcagcaccggggcccagttcactgttagctgcaggctcccaagaggggcgcgtgcgaccgcagcacacattaggcgacccagagaccttctaggaggccagagataagcagacccgaccctaagcagatcaacagtcctgcaggactcaagtgtacgggaccccactaaacatgttgtcccagacgccccccaatccctggacgatcccgcccccggaacgctggaagagacaggcaagggtagtgggaggcgcccacaccagccgcccccgcccctcccgcgggtccctagacccctcccctgggccagaccccccaatccctgctctgcccgccgggcccgccccccggccgcccccgccccccgccccgggcgcgacccggccccagcgcccagccggggacctggcgccggccgccccgccccgcccccccccctcgcggccggtgcgcgccccccgcccctgccctccccctcccttcccacctccccacccaccccacaggcccgttaccctcccgcctgctcgggctcctgagcagccagcggccaccggctccagcagcggctcagaggggttcggcgcgcgcggcgagcacgacattccaccggacccgccgagccgcgtcgggatagccgctggcctcccgcaccccgacctccctcagcctccgcaccttcggcttgtccccccgcggcctccagtgggacggcgtgaccccgctcgggctctcagtgctcccggggccgcgcgccatgggcagcccccgctccgcgctgagctgcctgtgagtaccgcggtcgcccccgcgtccccgtcggccagcgcccgccgagccctctccgctcaccccgcgcctctttcctgcccgcttttgtctcccacaggctgttgcacttgctggttctctgcctccaagcccaggtaaggagcgctgcgcagaagcgggggccgggcgcggggaacccagctgacactctcgggcagggacacgaggaccgacccttcggccagcgcagcagggctggaaagaactttacaaatccagccccaaactaccccgaggagggatctaaggaacagagagacagtgtcctgcctaaagtcacacagcgagtgagtggagagactagaacccaagggtcttgagcccagcgactggccagttcgggtggatgggaaggctacctgtagccacacctggcctcctaggaaggcgggagctggagtcagcgggtgttccttgtcaagggtagttgggatgtagttgcagcgaatatcctcgccgctgctctctggggagacctgtggccggtttgggccaacgatcgtgttaacctaggccctttgcattctcaacatttgctccgtaaatttgtctttataaatgtcacgggtcgggtagcgttgcctcgctacttaaaagcaccctgctcctctaggaaggcccgggcggggggcctgcgctgggcagggagcccacttccctgctccgagctggccgggagccccagggtgtttcccaacaggtgggtccagactccctcattcccgggttcatccatccatcctgggctgggtctgcgcgacttccccgagggggttggtggcctgagccggcatgttgtggggatgcccccagtccccgctggctgcctggcgcggcgggaggcgggtacaagggcaatggggaccaactcggggcccctgggcggagtagcgttataatggcgtgctgtgtatttttcaatttcctaaaggtaactgttcagtcctcacctaattttacacagcatgtgagggagcagagcctggtgacggatcagctcagccgccgcctcatccggacctaccagctctacagccgcaccagcgggaagcacgtgcaggtcctggccaacaagcgcatcaacgccatggcagaagacggagaccccttcggtaaggtgcattcccggaccctggagaggagaggtagcttggacctcgccgccccttgccagccccagctgcatcagccagaaaggcctgcgggctctccacctgagaagggaaggagttaagacgaaaaggtgccttggggtcagctggagagaatagtggggaagggaccctggggaggacgaggccaacaggtgccctctcttccctgctccgcaaatgaatgaatccaggagtctcccttacaatcttcacacacctctacccggctgcaggtggaggcagagggttcagaggagaggcccaaatttaaggggagttcttgaaagaggatatgtcgccagggcccacaaaaggagagtgggaaaaagaaagtagagaaatcccccagttcgcccagtttgaaaaagggacagaactgctaactgatcagaagggtcaattgcacagggagactcggcctgcaagttagactccgggctccactgtggataccccaggggactgagtcggctggcggcttcccgcagggctgctgagtacagggagctactggggcaggggctgagaactgattgatttctacaacattcaatattcttgtcttgaaatggggccaatttccagactccttggatgtaccacaaggaagccaaaccctcagggtggctggtgttgtttttagagagtgggatattgtaagtttaaaaacctttaaataatgaccaacttaagcgagcatgaaaggagaaaggaaaactctattaaaatgtaataaaaaggtgaggcattttaagagctaagaagaaaaatggagaatgatataaaacagaaaaagaaccaggcgttttctttttcagatgtagagtttgaaaggagttgcaagtctgtaaatgttaaaaagagagagagagagaggctcaggattgttctctgcgaatctctggagagacccccgcgtctggcagagcgattaaaactattcttactttcaccttttttaacgtttcctgaatactttctcctcttctcgagccagtttgggggatcgagtatgtctcgctgcatttttttttcagcatcgacatagctgacttcccttcaaagctagaggaggagacataattttcctgggataaatctgtcactggggtggaagaataggttcgaaaatgttaagctttccaaaagcctgcttgggaaagtctctgtaaactacacggtcaggctcccctgatcgatccgaggagaccagagggggggactctttgggtgggggtgggggcagcctgcctggtggccgagctccccccgctgggctggcagagctggccttcaggccctttgtccctccaaattggctgcttgctgcccttctcggcttcccaacaagaaaaaggaaagaatgccgagctcctccagagtttactctactggagcaaatggcctagcatccttgggttttggggtgggaaggagaaactaggctggcagtgatgatcttcaggcattagcggggtcagatgcccacttactctcttcagacccagaggaggctctcaggattccttggtctctgcctgaagggcagaaatttgagtctggggctccaaaaagcccataaaagaggcattaaggcatatggactgaagagagcagaggagaggtcccaattgctgtgttaggaccccaaaaatgggcagaggtattcattctgcaatatgacacttggctgcaatccccagagcagggtcctataagccccctctagccggcatccttctatggccatgaagcaattgcttcttgctctacaaagcaggcatgagaggaatgaacagtttgcctggagaggtggtcaggaggagaggtatacagttgtacctcccagctgacttggggacagactgaggacttcagcttctgggttgcacttttgtgtctcagtgaaataggcggtcagaggcgaggcagtgaggacttcactgatggccctggtaccccttttacccctggtattggttatctatagagagagccacatgtcaagatagaattgctttctcaaggaggaaagagtctgggctttgtagtggggcaggcaggagatccagtctcttctgccctgtcatctaattcagctctctctctcttctggggaacagcctctaagagagcaattatataaagaggtggtcaggacccgcttctggggcgagttggctgtcctatgcgaacaggaagtagaggagggcacagcccaagcttataccacctttgaaagctctggccagtgcctgagaaaccctgctataagggaggcgaaggagagaagacgatgagttgttggagactgtgtgttggagctggactctgaagattgggaagcagggagagggatcagagtctggttccagaaaaggccgtgtgctaaagtcagcgcgtagggagaaacaccctcttcctcctcgtctctgattctcttattttaaattatatatgtggtgtgtgtgcgctagtatgtgcgtgcatgctcgtacaggtgcccacagagggtatttgatcccttagaaatggagtttcaggcagttgtgaaccaccctatgcaggtcctgaaaactgaacgctggtcctctctacaggagcagtatgctgagccatttctccaaccccgctctgtcacttcttgcagaacagggctgcctaaggggagaaggctggccggggctggtaattagaactgcctgggcagggacagagcaggatatttttttacctttagcttcatgataggaggtcaccactgttcccggatgtccttaatggtctgtggggtaggagctcacgatagtctaagttggaaagctattcagagatctctccaatagctatggaatctacacagcttaaattttacttggcaccttgaccttaaaaaaccaaaccaaatgcttctggcatgagaaggggtctaagggaacagagatttgatgcagccaaacatttctctgaaacttatcctgtaaactgtcatttgtctcagaatttttataagcccagaggtggagtctcaggtcctgaaaagagagtggtctttcttagggctatccaacccatccgcaaatgagctgggctgcagcctgtgctttctgctccttccccctggagcaactgtaccagggataggacacatccttggaccccactgaggtaaagctgtagaacatagaggccacagatgtactgactgtccatcccataacttccctgacagcgaagctcattgtggagaccgatacttttggaagcagagtccgagttcgcggcgcagagacaggtctctacatctgcatgaacaagaaggggaagctaattgccaaggtgagctccaggagggaagtgggccttgagaggtggtgtggactgcctgagcctctcttgtacactttaatcccaagaaggtgggtggagaggcacggtaccttggttaccgcagggcttgcccaatgattagatggaggaataagagaaagaaacaaccagagagagtaaaacctatgaagatgaaggctagggaaggggttgggggtggtgatggcaaattccatatatctttttaacaaatcgccaaattgctttgctattatgtccaattacatggtaccagcatttggaatgttcagtaagccgcaggcccagcccctcggcctagctctgaaatggccccattagtcacggctcctctcgagtctcgagcgcctcacttcctaggcttctgggcttgggcctcagagtgccttctaggcttcccctcccccgcagagggtgtctgtcctgggagctgatcctaaatccagagatgctggagggttgggggtcggggggcaggtggagaaactcccggagcccaggccagactggtgggcagtaggccagaacaggcaggctttgggcccctctgcttcgggcccagcccctccgtggagagccatgtgtcactgctgcccaggaggacaggaagttgccgggtgggctgtgggtttgtgagggattagagagcgggtgcccgggtagggggtggggccgggctcaggctcccctcgccatctgctggggtgcccacctgctgtctggggccgctggccctctgcctcacaaggagggaggctccataacacctcgtctgcccccctcacctctactcccaactacctgcagagcaacggcaaaggcaaggactgcgtattcacagagatcgtgctggagaacaactacacggcgctgcagaacgccaagtacgagggctggtacatggcctttacccgcaagggccggccccgcaagggctccaagacgcgccagcatcagcgcgaggtgcacttcatgaagcgcctgccgcggggccaccacaccaccgagcagagcctgcgcttcgagttcctcaactacccgcccttcacgcgcagcctgcgcggcagccagaggacttgggccccggagccccgataggcgctcgcccagctcctccccacccagccggccgaggaatccagcgggagctcggcggcacagcaaaggggaggggctggggagctgccttctagttgtgcatattgtttgctgttgggtttttttgttttttgttttttgtttttgttttttgttttttaaacaaaagagaggctctatttttgtattccactggctgtggtgtctgtcttcttagctctcaggaaaagcccactagtgacctaagactgggttcctctggggttccctggggtggagggctctctggtctgttctcctgaaatcccaggattggcagggtacctggccaggccaaccagggccactctgtacccccggcagggggagagagagagagagagagagagagagagagagagagagagagagagagatattaggcctaggtcagtcctttaggggagtgggtgtcagtgaaggtggctgtgtaccagttactattaaatgactgaatttaacttgcatattagaaatgtgtgctggagattgagtcctgccccttcccatggtgctgtcccaactacaggtccaaggccaccccccatctaaggacctgctttgccagctttctttattccaatgaaagggttttgtggggaagatgggtaggcagacagaaagattctgagctggccttgggtctcagatggggatcaccttgttctgctaacactttccaagcccaaggcttgaatgaagaacacactggagccctctgtgggtgacaggctgggatctcttttggctctgtaggtctaatccggatgggtaacaggacagagaccatagggctgattagaatctatagaatctaacttcaaaagctgaagagcaattgcccagtgtccaaaggtttgggggtgggtctaggctggttgacacggtgctgagtcaactttgccatgactatgaacagaaagtgccaggctcgtgtgctcctgaaaaactgaaggcactgttgtccttgaagaggccaacctgggggacctgggccttcaggagaaagagctaggcctatataggcaagagtggaagagaggcttatgggatgaataccatagccatacctgtgctcagagctggcccactcttcactgcaggccttccatgctggctgttcctgcagcccagctactaggacaatctggaaacttcttccttgtaggcctttttggcacctctcttggcatgggttgaggcagccaaaggcttcctagccatgggggcattccagagctgttctagcccaaggctcaggctcagcctttccaggttgatcaggattaccaaggctcagtggaaagcctgaagcaagaggctgggcatcctcaggccctgtctactcatcccagggcctctgggtagagtgtagctcttcaggtgcggggacacgggggacacggggttggggtctggggaaggggcttcagctagctgtcttccagattacccagtacccagtgccttgtcctctgctcccctccccctttaattaattctgggtgagcagcctggctttattgtgcgaggagctggggtctcactgtgggaaaagtcacaccttctgagcagcttctgatgccatgcaaatgaagagaccgtccaggaaacgctttcatctgcacggtcgcctgtccagcccccagcccagtaattacccacatgtcatttgtttgagagcaattcctggggaaagccacagggtgggagggagtggggggggggtgtgatggaatgtcaggctctttgcctgtgatcctggctacaaagtgaggcctggctgggccaaagctgtgctgggaacatccgagtcttcagaggtacctggaattggggtatggtcacatataggtaggagaggtgagcagaagagagggtcagacctgccttctacaaagggaagagatgccctacagggcagaggccagcgaggtgggcaggagggtgggaatctgcctgaggctttgggaaggagcacattcgagtaggcctccgggccagggacccatgggagccgagcagagagcagtagggccggagcacccagcaatttgtttatctttgagttgctgcctccacagagccctcactaatggggttttacagcccactcaagctgcaactggccaagaatcaatcattaccgtacttagtggtttgatagttaacagcctgaactgaagccaaactggttgttaactgtgataacaactgatttcaaggggttattgccggcccaatatgcttagccatttattttggggaaaacaagcagggagctgtggcaaggcccagaaaagggaggaggactgggcttctcctcagccaaaaggcagaccactctatccctgggtcagctagacaagctgcctcgggctctctcccttctgtccttaccaagtcctgcttggattcttctttcttgcttggccattttctatcaaatggtgtctggtggagcctggggctggcatcagcttcattgtgtggcctccaagccttgaactcctcctccaaagtgcctctcagacattgtgtctctagtgcgctctcgtgacgccctcacagggagaagcccagctcagtggtcaggcctctcctcagcaggttgggctagacccttgctcatcctgaccctgggatgcccagagccatgctaagtctgaatcaaaaacttgcatttcatttcaaagccaccaaagacccaacacaggtcttggctggaaggaatgaagaaatgagcgagggctctcttctcccacagctcctgtccacccaccctgctctctgtgacactgtgacactgcccaggcttgaacaccgctgtgcaaaggacctcgctctctccagatggataaacggtggctcagaagtcaaagctaaaatatttccaggtctaggctgcctcttgaggactgtaggtctcaccctgatactgttcattaattcaataaatatttactgagtgcctgactctgttctgggcagatgagacagagcaggaagtttttttaaaaaaccctgaaatccccattgttttctgctcagctgcttgagggaggcaggagggggcacaaccaacgggacagagcgtatcagacacagcgtcagagacagcaatgagtgtgaagggtgtcggctggcgtaaacagcgtgatcacagcgtgatcaaagaaggcctcactgagagcttcgtgtttgaacagacacctgttggggcgaggctctcagattggggggcaggaggcacccaggtagaggaacagctagctcaaaaactagaggggactagagagatcagtggggctggaacaaaggttaggggagacctccagagctggggccgaggagtgtgttcagggggctggaatagcaagttgataaccacatgatggcgaggaacccagcggagggcagatcatacaggggccactttggcttagccttgcggaggtgaggtggcaccccattgtgaggttacaacagcacagcgacgtgatgtgaaggcagggatgtgaagattgccctggctgctgtgtgttaagtagagagactgtggggggcaagggagacagttacaaagcgacagagagaagctaagtgattgataatagtggattgggagaggtgagaagcgattggaatttgctggttttttttttttgttttttgtttttttgtcttttttggggggggaggggcaggtagctactgcagggtctgcaggtgggtttggctttggtttgggtaggaagagaaggtggctagggatgcctggaactgatgagcaactgaaagtgcccaccagggagctgctgaggtggtttgcagagaaggttccaggtgagggctggtttacagggaggctccggagtttgagtttggacgtgtgacgtttagggagccttcttgcatctgaaattccagggtgaggtctcagtcttgtgctataataggagtgttgaacacacagctcagagccaggagacagaatggagtcccaaggctagggcatgcaggggactaaaggagtaaagaccccgtttggagtcttaagcctcagagtggaggggagggaacacagacaaagatggaggaagtgtggcctgtgggatagtaggaaccccaggagactgtacgcactgctgcagcagaatgagcgctggcagaacctggagtttaagggtccattagcttcttcttcccctacctaccaaacccagagccaggaagtctccaaaaccaagaaatgtttcatccggagcctcccggattcttcccacaaactgacttgtgcttcacccagtaggtcccactggcttcgcttccagaacattctcttgtccagtccatccaatagcttgtctgtggctactaccctgctccaagccacctctactttttcttttctcttctcttctcttcttttcttttcttttcttttcttttcttttcttttcttttcttttcttttctgaaagtgtctcaccatgtctggtgattcactatatagaccaagccagccttgaactcagagagagtcgcttgcctctcaagtgctgtgattaaagacatgtcaccaatatctggcctccactttatttctttattcatttagacaggacctctccctgatcctggggcttgccctttgagatggactagctggtcatctgtttctgtgaccccacctccatcctgagtgcctgccgggggtcatgggtgtgcacccctgtagctggcttttacatgagcgctggggaacccagctttactcactgatagcttccccaggcctctgtcctccattctcacacagcagcaatcttggcacacagctgccttctctatccctaccagctcagtcactggaattttcaaaccccagatgggattgtgttagtcccaccaaacccaccctgagattctaacctggggcccatggcctacagtctcccgtgcattctggccttgaccggtctgtctcatcctgcatcctaagccacctttgtcatcgctcactgcattctgtccctgcctcttcagtctcttccggcttctcacacaagctaagtgggtgtttgcctgtctccgtgcctgctgccctccctgctgggaacgcttgtcctacagggtcatgagatgggtgggtgcagtaaagaactctctgatttctttgttcccttgtgcagtgctgaggcctcacatatgctgggcaagtcctctttctgctttttagttcataccttagttgttttgggttttttggaaatgggagtttacatacggtggcgtgcacatggaagtcacaggacaactattgggaaaaaaaagttttattaagatgcctaggctggccttgaccttgggtttgaaatcttgcctcagctcccaagtagtgaggtttacaatcctcctagtttgctcctccgttgctgtgataaacacggactagaagcagcttggattggaaggggcatttgtttggcttacggactccaatccatcattgagggaagtcaacgcaagggcttaagtcagtaacctggagacagaaactgaagccaagacccaagaggagtgctgctcactggcttgctccccgaggcttgctcagtttgcttctttatacaactccagaccacctgcataagggcggcactgcccacagtgagctgggactttcacatcaatcaatcgccaatcaagaaaattcccctcagacaggcagacaagggcagtgtgatggagaactatgccttacccttcttcccaggtgacttgcgtttctgtcaagtcgatgaaagctagccagcaacaggcctggcaccatgaaggtctgtcctattttctatgttattctccccactcactggtattttcctggtttctgtttcttagattctgctctgtctagctgtaccttcccaaagagcgagaaccttggtgtaacttgctcattgcctaagacagcactgctgaatgctgaccacctagctcatctgagctatgctaccttcgtacttatttatttacttacttatatatttgagacaagattgggctgacagaattcacaatgtagtccaggctagccttgaactgttgacaatcttcctacacgagcttactgaatgttgggattataggtgtgagccgaggtacatagttcacgcctctactgtttacaggagaccacaaacccattttttgaaggcacggtaaatgttccctaagcttggacaaatggagatcaaagcaggacctattggactggaaacctcagaacccctccaaattctgcttccttggttgcattgggtttccatagcaaccaaggggcttcagtaaagatggtgagtggggaattaaaagacagagagagcagagaagagaggaggagtaagtggtggggagacagatggggagctggcaggaactccggggggatccccaagtcccatgttattctggaaggttgtgccaagaaggatctgttggttgctctccctcccatctgggtctcgctgcaccctaagaagtgactgtccatctgggcaggcccagagctgatcgcttgtgagccccctccctctgcttggcagacactgagcgaggcctgggctctatccctcagcaaaaaacacgaggaagccctgggctgattcagggaacacttgtttgcccttccttgcttggctgtcggtggaaggagaaaggactgtccaggcactgtcccctgctgaacatagtcctttgccctgacatttggggatcgtggcctagctcccagtggttaaagatcgtatggctcgagtgtaggacctgactggaagtactcagaacaagagcccaggcctgggtgctgctctgagatatgcaggagaagcctgaagaaagcccttctggagtggcaacctgttcctccctctgggaaatacctgagcctgaagcctgcaagggatcctgggaggacccatgacatctgccagcagcctggacaccttggtcctgagacccaggacaactgtgtggagaacaggtcagtgaccatcaaattacatctgtccctctgcccgaaggcacatattatggaagacctcaggggaatgtctgggacctggactcaagacagagtggtcccctaaatgtcatttgtccctaaatacctccactgtcatggatcccatgttatgtccagtgtctgatttaataatttcatttttttccttccttccttccttccttccttccttccttccttccttttttctttctttctttctttctttctttctttctttctttctttcttcctttcctttctctttctttctttctttctttctttctttctttctttctttctttctttctttctttcttttagaaatgatctcactatgtagccctaactggcctagaactctttatgtataccactggcctcaaacccacagagatttacctgcctctgtttcctggctgctgggtttaaatgtgtgccctttatctatatctatctgtctatctgtctatctatctatctatctatctatctatctatctatctatctatttatctatctactgtctatttatcatttatctatctatctcactctttttcttcctttccagatctggaatggatcacttgatcttgtgtatgctggacaaaggcttcagatccaaccatttcaatttgacaaacaccatcacatctcacgacatcgtcctccacaaagaaatcctgcgttccatcctaacaaatacctgtgctatactgcactgttccgcttgcctcctgccctgcctcctttggtttcttcgacagccttccctggagtcactgccttctacacagtgcctaagagcaagcccatgaaacattcatggtgggtaatccactgtggaggacctactgatggctgtcctgatagaacaggcaggtcagcggaggctgggcttgggctcaggttccagccacttccctgaaactggtcctgattctcccaagggaaggctggaggttcagatcctgagctgccagcagatgttcctgtgacgggatgcgatgtagcagctcagggagggagagtggcttcaaggttacccataagtgaggtgcggtttgttagttgagggtctaagagccaggagacaaaaatgagccaaatgactcaagagctaaaaagggcctgggtctgtgctgagtgagaggagggggacagagcctaagtttgtggtatctgaaatttcttttcttttcttttcttttttttttttgtttttgtttttttttttttttttgagacagggtttttctgtgtagccttggctgtcctggaattcactctgtagaccaggctggccttgaactcagaaatctgtctgcctctgcctcccaagtgctgggattaaaggcgtgcaccaccacacccggctgtttcaaccttcctaatgctgcaaccctttacagttcctcgtgctgtggtgaccaccagccataaaattattttgttgctcctgtagctgtgattttgctagtgttatggattgtaatgtaaatatctgatatgcagaatatttgatatatgacccctatgaaaaagtcgtttgaccgccaaaggccttgcaaaccaaaggttgagaacagctggcccgagagataggcctgcgagaccacgggatggaactatcctggatccgattagaatggtcagcatcaacgtttgtgtgagtaggggagtccagcgggtgctttagaatgtcactctttggaccagtggcttctgtgggcagggactctgtgggaggagctgggccacctgagtaagggctctgaggtcaggcgtgcagattgacaccatcactggtaccgtaagaagatgcactgggcctctatggaggctgctttcttgggaaacagtttagtagcccgagggcctgaggtcacccaacagctggcaaagatcaagggcaagtttctatgtgcccatcagatgcccagcctttctctcagccttgcatttactcaagcaggtgtggctgcctaaggcctggaccctcagcagaagcaagaggtgcagatgcactgattgtctgcaggggagaagtttttcctgcttgttcttaaggggctgggatgtaaactcgtacatctcgctcctctgagctccctccaactctccaaaaagcacaaagccaagatgaggaggttcagtctgagctgcctggagtctgaaaaaaatagaggagagaaagatcaaggacagaaatctggcatccagggcttcttgtgtccctaaaggcaaaagctcaccttttcctttcctgagtgccttgagttaacatggcatggtcaggcaccagaaatgcagagtttggaagccacgctgagcagaatagagagatctcaacgcctgctcccgtctggcacgtgcagtcaggcaatggtgatgggcgcttgaggttgagacaggaaggggaggggctgggtgaggaaggtgagctggggaggaaggtgctcaggggaacacagtagaaggaagccccgggttggcttcgctggaggcagccaatcccagctcagctcaagttcagttctgctctcactggtggaaggaatggggtctgcgaggcaaggtctccactgggctcccaaactagcaaacctgtacttgtcacgcgacatggtccgggtagctcctactggggcacctggtaccctgctcatctgaatctccaaaggggtcacagagaagacaagagctaacagtgagcgaggagtctcagggacgttcgtcttttcctccttccttccttttaacatttttggtttggtttgtgaagtcagggtgcactccccgtgcaactccccatgtgagccaagatggcctcaaatttgagaccctctacctcagttgcttgcggttacacatgtgtgctaccaggcgttgacaactttcatcttttctgtaccttagttgtctcgtcgtatgtcagtcagtggagcactgcctactatgtgtgcagctcaggcctcagttcccagcatgcacctgggtaaggtgcacacagctatcaatcccacctcctgggaggcagaggaggggaaagaaaaagttatggtt

SEQ ID NO: 576 - DNA, 1078 bp, Mus musculus
ccagcagcggctcagaggggttcggcgcgcgcggcgagcacgacattccaccggacccgccgagccgcgtcgggatagccgctggcctcccgcaccccgacctccctcagcctccgcaccttcggcttgtccccccgcggcctccagtgggacggcgtgaccccgctcgggctctcagtgctcccggggccgcgcgccatgggcagcccccgctccgcgctgagctgcctgctgttgcacttgctggttctctgcctccaagcccaggaaggcccgggcggggggcctgcgctgggcagggagcccacttccctgctccgagctggccgggagccccagggtgtttcccaacagcatgtgagggagcagagcctggtgacggatcagctcagccgccgcctcatccggacctaccagctctacagccgcaccagcgggaagcacgtgcaggtcctggccaacaagcgcatcaacgccatggcagaagacggagaccccttcgcgaagctcattgtggagaccgatacttttggaagcagagtccgagttcgcggcgcagagacaggtctctacatctgcatgaacaagaaggggaagctaattgccaagagcaacggcaaaggcaaggactgcgtattcacagagatcgtgctggagaacaactacacggcgctgcagaacgccaagtacgagggctggtacatggcctttacccgcaagggccggccccgcaagggctccaagacgcgccagcatcagcgcgaggtgcacttcatgaagcgcctgccgcggggccaccacaccaccgagcagagcctgcgcttcgagttcctcaactacccgcccttcacgcgcagcctgcgcggcagccagaggacttgggccccggagccccgataggcgctcgcccagctcctccccacccagccggccgaggaatccagcgggagctcggcggcacagcaaaggggaggggctggggagctgccttctagttgtgcatattgtttgctgttgggtttttttgttttttgttttttgtttttgttttttgttttttaaacaaaagagaggctct

SEQ ID NO: 577 - protein, 322 aa, Mus musculus
SSGSEGFGREHDIPPDPPSRVGIAAGLPHPDLPQPPHLRLVPPRPPVGRRDPARALSAPGAARHGQPPLRAELPAVAGSLPPSPGRPGRGACAGQGAHFPAPSWPGAPGCFPTACEGAEPGDGSAQPPPHPDLPALQPHQREARAGPGQQAHQRHGRRRRPLREAHCGDRYFWKQSPSSRRRDRSLHLHEQEGEANCQEQRQRQGLRIHRDRAGEQLHGAAERQVRGLVHGPQGPAPQGLQDAPASRALHEAPAAGPPHHRAEPALRVPQLPALHAQPARQPEDLGPGAPIGARPAPPHPAGRGIQRELGGTAKGRGWGAAF

SEQ ID NO: 578 - DNA, 25582 bp, Homo sapiens
gccgtggccaattgtctcctgtaatgactgttggttcaggcatgttgtactttgtagggacaaatgtgcatttgtttgtggcaaaagcctacaattgacaaacttgtaaatttctttgtatataaactagctgtaacctgactatcctttgtgtttactgtttttgtaaatttttttcctctataaatgaaagggtgttggttcagaatggcactttgaataatgtaaaccagtgaaaagtggattttctttacttttgtctttgggtttggggttgtttttgttctttttgaagttttattatttttaaagtgcctcccacctaggcgtaggccatgaccatttggggtacgagagcctaattttgtaggacttaatctgttgaaaagtgcagttacttctggaaattaacctcaatattaggtcagcatgtgaaatgttggatttgacatgtcaggtagggttcagggactgattggtcccatttgccctcaggtcagttgtttaatctcaagacctgttactactgattttattaaatcagagtctttaattcttgcatgtttgtatctaatttctgaacgaatgagcacactttaaccagttatttacagttacctttttcctttaaccggattgtgaaagcttcatgtattttaatttagattctgtgtttttaagggttctgagcatgaagctggcagatagtcggcaggactcattttttcatcatggctggctgatttctccatagattgataacagtattttgttatcttgcttctctgtagttttgcatcagctgtttaactttgagctgagtgaggggagaggggtaaagagaaagaaacttaagttttctttcacagaactccaccattgtgggctttgagagagccctaaagcattgtacctagtggtacctagtgacttccaaccaaagcctttgagtatgcactaaataggtgagaagaaaggagagaaggtttttaggttagaaacctttaaccgatagaaggatatggtatgttgtaaagctggaaccaagtttgcatttttgagggcttgagatgaagggaagactcttaccagatagtaagacagctgagttttcctcagttttctcgtcttaacactagtggacaattctagcattttgtttggaggatttcagagttaacctcatggaattcaggattttttagcaagtttgcttttggttttatcttggcttttagtaatcatgttggctggtctggtcacaggtgactgtgaaacagatgccctggtcttgctttcatcactctaggatcatgaagtgctatgctatttcctggttatgaatattaaggttggaattacatttttattgattgtttggatcagagctcagttcctgtagaaaacgaactgtaaaagaccatgcaagaggcaaaataaaacttgaagtgaatgcttgtcgtgttgtattgtgtgaatctatttcctgtctgccccctcccttttctcctctttcatgcctcacctacaagcaggtattctctcctctccacagctgttccaagttagagattggatcttgaaggcagccctcccctacctccatcaccagtaagacttccagattttcattaagacaagagctaagaaaagtagactagtttttagccaagccaccccaccctcttgccacagttataacctggatgtgaaatagggcctctagtttgagttttgccatctattaggatagaaagcacacagtttgcctgattcttaaaaggcgaaagatggcgcgagtagcataaactgacaaaataatccacggcgcaaagatactcctggatgatttggaattaaaagctcaaaaagcgtgggtgggccaggaacagccaacacacatgagctaactagtcctctgctagcaagtgccagcagctaagtctcagtgaaggcatagcaagttgcggggtctttagagcaggaagaattaagagaggcttagccgagaggacagacaggacagacgtgttgggatggaaattcctaaggctcctcggctctcttgaggcaaagacaatctgagtgcatttcctttgcttgtagcagaaaagcactgccctgaaccccacctttgctgggaggagtaagaagggtttacatttttatatctataactcctttaacgaaagcttaccctgggttggaagagtgggagacactcttccgacacagagcgaggagcttggggaagtggacaccctcatggtcgtggaaatgagcaaggatgttaacataaaccccaaatccattcttctgtgatgttacttcctttctcttcggtcttgataaaatatgagcagaagctgcgggctccgggtagggctgcggggtctcggcgccttttcttttccaggactgtgcgtctcctttaatgggcggggccggaactggccgagggtccccggctttgtgcgtgtcgggggcggagtttgaagaaggctcttacagcatggccgccggtactgcagctgccttagcgtttttgagtcaggagagccgaacgcgggccgggggtgtcgggggcctacgggtcccggccccggtcactatggacagttttttcttcggtattagtgaagggagaggctgagggtggtactggggcggtaagaggtagggatgtgaggcgggaatgcggagggtttcaaggcgtgggtgtgggcggagggctgcttcgctgttcccgcaggagagggggcctcgcacgcacagccaaagggggtggcgagatccctgccccagatgtgttgggcggggcccacggcagagcgtcccaggtgttctgagagaagagacggaggtggacgtgtaaatgacccgtccgcccaaggttacacgtgacggcgggttggtgacatcccccgctgcccagccccgtacacacgctcaggcatactcactgttatttctaccaggctgtgagctctccggccacacccgctccttcacctttaaggtagaggaagaggatgatgcggagcacgtgctggcactaaccatggtgaggggcaggggagtggggttttaatgaataagcccaggcaggcaatataggtctctacccaacctccggatcccctttacttggagacacatcctcagcctaaccccccggcatgggcggctcccctggccaggtgaaccgggacctctgaggctgggcaggtgctagggtagatgcctttagttgtggtgtcaaccctcacttgaggagaccctgaggccctgtgtaccgttcccagctctgcctcaccgagggagccaaagacgagtgtaatgtggtagaagttgtggcccggaaccatgaccatcaggagatcgcagtccctgtggccaacctcaagctgtcctgccaacccatggtgagttccccagctctgccttggtggtggtggtggtggtggtgaggggattgaggacgttagcactcattacagtgtggggtgggctaggagtgggccaggccttcatccttgtcttcctcccagctcagtctggatgacttccagctccaaccacctgtaaccttccgcctgaagtcgggctctggccctgtgcggatcactgggcggcaccagattggtgagaagaggggagggccctctcctttgcttccagtggactctcccatcaggcttcccccactccgcactcctgccccatcccaccctcatctcccagtgcagccctgtacaggtctgtgtgccctccacgctgtgccctgtgcatgacatgccctctcctttccgtctactcaagcctacctcctccatggaacatggcccaacttctccagctccaataatgaagactcctttggctctttgtgacccagtttagggtctgaggttcttcccacctagcccataagcactgggaggtcatggtccctgtaagcctaacaccacggcgtgaagaaatggcatgcggtgtgaaacggtctggtcttaacaccccatccttctactgcttgtgtgtccaccagttacgatgagcaatgatgtttctgaggaggagagcgaggaagaggaagaggacagtgatgaggaagaagttgagctgtgccccatccttcctgccaaaaagcaggggggcaggccctagccctcctaggtgagttgcggggagaagtgcctagcaggctctgggaaggggcaggagaagcaggtgagggcctaaatgctgattccttgtttcctcttttcaggtcagctccatgtgccatgcaccgccatgcaccctgttccctgacaagtttcaacaattgtaaatatttcttccttgaagaggagagcttgggtgggggttgggtgggagggacttgggtctttggtgctaggagagggcctgtgctccacacagccgtggttttctgattttcaccatgcccggggcctcccttcccacctgcctgtgagaattggaggttagtgcctgaagctcagagctacacatttttaatagtttttacatttttggataaaggttgaaataaagtggtgtggagtttttgcagctcttgtgtggcttcttcctgtgctgggtgatgtttccctagggaccgccaggtggcactgtggcagcacccagcgtggccctgggcctgggggagggtggagaactgtgggatcctctaccctcatggccctgggctaggacctggggcctgggccccagttgccttgctggaaggggacctcccaacactcagcccattcccagtctctgcaggtgggagagggtcatcgcaggaggttatcagcatccaaacaaggggtctgggcctctgtcagcactcggctgatgggcaggggggcagataagcgagcttaggcagcctgaggaatgcgcgtccctagccccacgagggtctctggcccagagagggcctgtgagggcagggcgggaccaggcttcgctcctcctttgagccttgcaggctgtctctgagcagggctgggcccttagagaaacctgactccgggggccagatggaggggactggccagattgggtgacagggaaaccagaatccgggtggcctggcatatgggggcagaaaggggccccagggaatttgcctcctggactaagggattcttgtcccccacacaccgtggggtctgggggtctttggtgcctggaatcaggtagttctggcacttggctgcctttgtgccaggaagaactgacacacctggtttgaggatgagtgtatgtgaccagctctggggtcagcagttcagcagctgtgttggttgtggggggagggttgtcaatgcccacaaacaaacaaacaaacaaaacattgcctccccagacaacctggggccagacaggctgaggatagacagagaacagggcctgatgggggtcaggccaactcccactcccagcctctagtcaagggggaggggccccgggatatcgcgggctggtggttctggggcaggtgaggtcagctttgaagaccttgcgtccgcagtaccgacccgcacgctcttcagcgcatccctagtgaaggaggttctcccccagcccgtggtgaggaactaggggtccagtttccaacctccctcttcctcaagttgaggacaaagggagatgacgcccgtctgtgttgcggtgatctgggtcgcaggcgcctttctccgatccaggagggcgctgctaaaaatgcttccctggggagcccggcggaggggcggcctggctgggaaccatgggtctcgctgcggagcgcggtcggcagggagagggaagtcggggctggcgccctctggcgggcgaggttgaagccgctcgtggtcgtaccgcttccctggcctctagaggctccgggcgggcgccgtggggccggggcctccgagtcccgccactgctctgggcggccgaatcttgggcggaaggcgggggaatgccactgaggcttgcatgcatgcgtgcatacgttcattcattcattcgaacgacttgagttggagtggggaagtctggctgtggccctcactcctctttcccttcctcttcttggccccagcctccaaagtcctcggcacgtgcttggcaggaggagcgggagactggctgagtcctctctcctgggaggcctccctagctgacccatctaccccctgcgcggctccgccccaatatttaccccacccaccccccgcgatgccactgatcgctccttgcatttctcgccggttttccgggtaggtctcccggtgggcgcgggcctgcgccgagcacgctcctgcccgcagtgggggcccaatccacatcagcctctcggcccaagagtttctcggccggttggggcgccccgcggacacagctgggcaaggtttattcctctctcctcgccccagcctctcctcgagccctcttctttgcccttcagcgcacagtaggagcgctgccggctcactgtggcctcagacccctgggggatgaaggcatacgccggggtttgccgactgctggaggaagggcaggcttctatttgggggccgagggagacgactcccagacagtggccgaagtgcttaacgtagtctcggcgatttgcatttgaacggtcggcagtgagtccgcggcgctttgaacgcccggcgcaggaagcgcgcgtcggagcgagctgcggtctccggcgggtgtggattggaggggccgggggatgggctgggatcgaggggtgcgtttggaaataggctgaagtagtgtgtctgggtgcaggcgagggcgtgtctgcggagatgggccgtttgtgttggcgaggagtgtgtgtttgtgtttgcaggcgagggagtttgtgtctgtgcgtgtgtgtgtttgtgtttgcggagtgtgggggcggccaggaaaggtggccgggctgtcactcagcgatcaggttgacaggcgctccctcatctgggccagggagctctgattgcagattcgaggaaacaaaatagcaattgtaattaccgggctttgataagataaaggagggagggagctggccgggaggcgggcgagccagcaagggagggagcggcctgcgggggcccggcgggacatttgcatctgtcagtcacggggcgtgccagggcagagccaggtgcttgctcccggggtgtccccatctgctcctctcccccagagaaacggacttttggggagatgagaatttcaacgaactaggtgagggtccgcttctcaggagggtctccaaatccaaatgtaaaggaatcctggtccagcacaggctccctggcagaggctgggacaggactgaaacttgacctcggacccttcagatcccaggacgcccatcttctctggggcagaggaagaagggtggctgaagaccattgagggtcaacccagggccctcagaatcttctgggggttccacagctggagctgaatgctggtctcagccaggggctctgcccctacccccattccagggaggggcaggtacccagagtggctctggctgtgaccccaggaccatgcaaacactgttggatgggcgggtcaccctcacccctgcctggggcctactccctgctctgcttatctcactgatgttcagagagtccatggtgggagaaagcccatttcttacaggaagtgcctgctctccatctctccattcaatcatttgttcatcgacatacgcaactaaacatgcttgagggcctactgtgtacaaggatgagggtaagaccacaagcaaacagacataacctttgcccacttgaagcagtgcagagagggaaacagacactcaatgaattgtgactcaggccttacacagaacacagggaaggcaagggctggcctgggctgtggccacttgtgtccacctgacttgtctccgcctgatggacccacctccccatgggctttagaggagacagtgcctgccaagcctgtggcagatacaagtgctcactaactggtggtgttcctggtgataatctgttgggaggaggtgaaggcaggtcttcctggggaagttgcaaataggctgaagtctacaggctcagccacttcccccatcattcattcattcattcattcaacgaactcttaattgcagaacagctctgcccagccttgtgccacgagctgtgatttctgagctcataagacatggtccttgtgggcaaggtctgtgtgggcaagagcccactgaacagactcctggaggaggatggcaagtgtgctctggaagtctacttctctgaggagggataagatcttggaacgcaccctctaactgttttcccatctctccattgctcagtgtttgcatttatggctgggagttggaaagatggggcacagggaaaggtgggacacagagcagggagggaggcagggcctggctgtgctgctggactagggctgccgctaattttggcctaatggcttcctgggaccacaccaaaccctccagccctacccccaggggaatggagggtcactggggaaggggaggttgtaagtgaagacagcagtctggtagggcatcacctgctcctcacaaggcacctgtcccagagcatctctgtccacccaggctgctcccacagaagcagcatgggggctcagggtttccagaaacctcaggggggaagccacaaggtggggggctaggaaaggcttagacaagtgcctaccttctcctatgccccaagcccagctgaccagcccctgcctagaatacagtaggtgtgtaaatacctgtgaaatgaaaaacgagtggggctttgagggggaaagggctgggtggcctggatggaagtcccttcccccagtaaaagctactgagagtttttttgcccctgctgcctgctgaggtacggggacagtgggtcctgccagggacctccggactctctcttccacacaggtggctcggggtgctcctcaagcttcaggctagtgtgtgtgtgtgtgtgtgtgtgtgtgtgtgtgtgtgtggtgaggggcacaggggaaggggtgatagtgataatgggatggggggagggggaggcatttctggctcccagggcctcctcgggagagtgaaggagactggagagaccgacaggacggggcacgcggccgaaacaggggagcggggtccgggtggcaccggcacgcactgcgcgagggccgggtgcgcagccattcgctgcatggttagcggccgctcccaggggcccggcgggacacacagtaggtggctcggagaccactgcgtagccggcggcggaagcggctgggcccggaggcggagacccagacccgccagactcgggcgctccaggcggtcggggaagcccaggctcggggtctcccggcccgcagagtttgcagccctaggcgcccccatccccgcgcgtccgggcccggggagcgcgcgaggggacaggccggggatagggggaggcgcccagaccggccgcccccgcccctcccgcggtccccagacccctcccctagcccagacccttcaatcccgaacccgtcggccgcccctccccggccgccccgcccccgccccgggctgcatccaggccccagttcccagccgggggctgcgggctcccgccgcccgccccgcgctcccccctcgcgcccggtgcggcgccccccgcccccacccctcccagccctcccacctccccacccaccccgccagcccgtgaccctcccgcccgctccggctcccgagcagccagcggccaccggctccggcagcggcgcacagcgattcggtgcggcgcggcgagcacgacgttccacgggacccgcggagccgcgtcgtgatcgccgccggcctcccgcacccgcaccctctccgctcgcgccctgctcagcgcgtcctcccgcggcggcccgcgggacggcgtgacccgccgggctctcggtgccccggggccgcgcgccatgggcagcccccgctccgcgctgagctgcctgtgagtaccgcgccgccctgccccgccacccgccccccgcgcccctcgcctcacccgcgcctctctctcccgcccgcttttgtctcccacaggctgttgcacttgctggtcctctgcctccaagcccaggtgaggaggggtgcgcggaggcgggggccgggcgcgccggtgtgagacccgggtgggcagcgccggtcgggggcaccgggactgactctgcggccggcgcgggagggctgagggcaccttagaaacccagccccgagccaccccgaggagggagctgaggcacagagaggtagcacccctcctgaggtcacacagcgagtgagtggccaggatagaaacgaaggtctcggagcccagcactgtcccccatgcatcctcgccggctgggggcatagggaacacccagccgccgaggaagggggcagccgcggccaggggatggatgttcgatgccaggggaagccgggtgactgcagcagagaccctctcagcgcccctcgggggaggcttgtggccgatttggcccaatgatcgggtgcccaggttccctgcactctcaacatttgctccgtaaatttgtctttataaatgtcaggggtcggggagggctgcctccctacttaaaagcgccctgctcctctaggaaggcccgggcaggggccctgcgctgggcagggagctcgcttccctgttccgggctggccgggagccccagggtgtctcccaacaggtgggtccagcttctccctggggctcgttcatcctgggctgggtctgcccgacttgcgtgggtgggggatggtggcctgggctggcatgttgggggaacccccagcacctgctggcggcttggggcagtgagggggacgcagggtgatggggccactcgggcccctgggcggagtagcattataatggtgtattgtgtatttttcaatttcctaaaggtaactgttcagtcctcacctaattttacacagcatgtgagggagcagagcctggtgacggatcagctcagccgccgcctcatccggacctaccaactctacagccgcaccagcgggaagcacgtgcaggtcctggccaacaagcgcatcaacgccatggcagaggacggcgaccccttcggtaaggcgcgctgaaggtagcttgtgggatgcgcggcgcctggaccaccagtcccaactgcactggccgggggcctgcagggtccccagctcagaagggaaggagttaaggcagaaaggtgtcttgagggtcagctggggaagagagggctagggaaggggcctcggggagtacttggccacaggtgcccccttccctgcccagcaaatgaatgaatctaggaatctccctttacacctccccccttcatacactcctccccagctgcaggtggaggcagggggttcagggggagggggcctaggtttaaggcaagcgcttgaaagaggatatgtcgccagggcccacaaaaggagagtgggaaagagaagggagagaaatcccctcaactctcccagttggaaaaggaggttgctgggaacccttaaatactttaatcggatgggtcaatttacacgtggaaactgggcttggaagggggctctccctgctccattccctggggaacccaggcggctggggcagggctcccggctccctgtggggtggcaagtgcggagagctactgccggcagagaggctgaggactgattgatttctaaaacattcaatattcctgccttgaaacggggccaatttccagagtcctggatgtaccaagagaaaagcaagccctctgggcggctggtgttgtttttagagagcgattattgtgagtttaaaaacctttaaataatgaccacgttaaacaagcatgaaaggagaggggaagactctattaaaatgtaataaaaaggtgaggcattttaagagctaagaagaaaaatgaagaatgatataaaacagaaaaagaacgagctttttttcagatgtggagtttgaaaggagttgcaagtctgtaaatgttaaaaaagaggttcaagattgttctctctgaatctctggagagacccctgcgtctggcagagcgattaaaactcttcttactttcaccttttttaacatttcctgaatactttctcctcttcttgagccagtttgggggatcgagtatgtctcgctgcattttttctgcatcgacgtagctgacttcccttcaaagctggaggagacataattttcctgggataaatctgtcactggggtggaagaataggtttgaaaatgttaagctttccaaaagcccggtcgggagagctgccgtaaactgcggccccagctccccagatcggagcagattcaaccgacatgggagagagcgggctttctggggtgggggtgggggcggcctgcctggtggccgagctcccctactgggctggcagagcaggcctaccatccctttgtccctccaaattagctgcttgctgcccttctcagcttctaaggagaggagacgaatgcctggctcttccagggtttgctctgtcagagcaaatggcccagcatccttggatttcggggagggaagcagaagtcaagctggtgtgggggaattcatcttcagacatcagaggaagcctgatgtccacttctctccgtggccatataagaggtttcccgccttccctagtccctgccccacagcaggataggagctggaggccctaagaacagaggctcagggtgttcagccaggacaggagtagtccggggagaatagcagagaggtctcaatggcttctttaccggccccaggaagatgcagaggcacctacttcatccctgcctgccgcatctggccagaatccccagagtggcatcctctcactcctccagtcagcatccttcctggcccttaaaaatagctgcctcttgctgtggaaggcagagcgggagagggatgagcagactggctaggtccaggaggaggtgggcaggcagggaggtgacagctgcatttccctgctgacttggggccaaaccgggggcttggccactggtcccagcactgagcctgtgtgaagcggggaacattacaagctgagcagtgatgactgacttgctgacctcgatgccccaaacccctgccatgggtttcagggacagaggaggtgccatatgtcaatgcaggctaagtccaagaactgctttctcagggaggggagaggctgggctctgcggcagggacggcaggagagccagcgccttctgtcccttcctaaacagtgaagtcaccctcactactttcttgaggacagcctataagagatgattgcacagagaggtgaacaggacaggcttctgtggcaagttggctgtctaaggggaggggaatgggaaaggaggcatagaattcagccctgcctcctggcctccagtctaagaggccagcaggcaggattctccctcctcctcacccacagaagctatttggtcactgggctgagaagcccagctgtgatgaggctgaaagagaaaagacaattgagttgttgatttctagacactgggctggggaccctggtgactgggaagccacagggaagaggcaggatcctcctggcaggtgtctgaggttctgggaaagcagcctgctttgggctgtgtgtttagggagagctgtccccatccctagcaccttctcagcagagcagagcctggtgatgttgaggggctgggggtggccaaagctgtgagttagaacccaaagtggcagaaacaggagacaatgctttcatctttggccttgggactggaggtcaccccttcacccaagtgtttgtaatgacctgtgagacacgcacacataatatttggagttggaaggatcctcggagatcttttgattagctatggaactctgattcaattaaattttacttagatcctcaatctaagagacatcactgtctggtttaaaaagagggtggaaggaatggcacttcagccttttcaatttgatagtcccaagacctctcttgagaacccagtttgaaaaccataatcccgtccactgccctctgtaaacccaggggtggggcccgaggtccagaaaagccctttctctgggttgcacagcatgttagtagctgggctggagctggagtccatgttttgggttcctggtctttggagcagttgctgctgggctgtgacaagtgtgtgggccagctggggtcagggatctgccaatagccatcctgctaccttctctgacagcaaagctcatcgtggagacggacacctttggaagcagagttcgagtccgaggagccgagacgggcctctacatctgcatgaacaagaaggggaagctgatcgccaaggtgaggccccagcaggcaggtggggtccgcgggacctagggagtggcttgggctggctggactcctccaagacagtcctgggctctgatcccaacaaggtaggcagaaggccacagggccatcttggggttacctcacgattgggtgcaggagtgagggagaaggaagctgtttgagagatgaaaactataaaaggcgaaggaggaagaatgaaggctagggaaggggctggggggtggtggttggtaaattccatatatctttttaacaaatcgccaaattgctttgctattatgtccaattacatggtaccagcatttggaatgttcagtaagccgcaggcccagcccctcggccgagctctgaaatggctccattagtcacggctcctctccagcctcgagctccccacttcctgggcttctggggctggggtcttagcatcttctcccaggcctcccctcccccatagggtggctgccctggggccagggaaccgaagtcctgggggggtgagaggggcaggtggggagacgggtggccagactggtgggcaggaggccagagcaggccaggctctgggcccctctctctgtctttctgcgttggggcccagcccctccgtagacaaccatgtgtcactgctgcctgggaggacaggaagttgccgggtgggctgcgagttgtgagggattagagagcgggtgcccaggcagggggtggggctgcggctcctgcccacctcgccatctgctggggtgcccacctgctgtctggggccgctcgccctctgcctctgctgggggggctctgtaacgtggtgtctggctcccctacctgcagagcaacggcaaaggcaaggactgcgtcttcacggagattgtgctggagaacaactacacagcgctgcagaatgccaagtacgagggctggtacatggccttcacccgcaagggccggccccgcaagggctccaagacgcggcagcaccagcgtgaggtccacttcatgaagcggctgccccggggccaccacaccaccgagcagagcctgcgcttcgagttcctcaactacccgcccttcacgcgcagcctgcgcggcagccagaggacttgggcccccgagccccgataggtgctgcctggccctccccacaatgccagaccgcagagaggctcatcctgtagggcacccaaaactcaagcaagatgagctgtgcgctgctctgcaggctggggaggtgctgggggagccctgggttccggttgttgatattgtttgctgttgggtttttgctgttttttttttttttttttttttaaaacaaaagagaggctctatttttgtattccacttggctgtggtgtctgtcttcttaactctcagaaagctccattagtggcctagactgggattccggctgggggtttgcgggggtggggggctttctctagcctgtgctgctgaggccccagtacctccagggccagttggctgggcagccagggactccactgcacccccaggtggggcagggaggaaaggactgtgacatagggcagtcctcttagaagtgggtatcagactggtggctattaaatgattgaaatatttatttaacttgcatattaaaaatgtgtgctggagagtgagtcctgccggggtcagcccctccctccaaccttgccccagctggtgggcggctgggagacgcagatgaccaggtgccagctctgaccacagcctccctccagcctaaagacacctgcctgtcaaccatccccatcactgtcacttgaggggttttcctgcaaggacagaagcagggaaaggggcaagaagaggctcttagctagtccttggagctctcagatgtgtacctcctagcactttacagaggtcattgctaacacttccccaggccacctcagggccagaaataatggatgtgctagggctagagctgtaatcatggatttaatcctcttaaaaagtgcttctctgagtgcctaggtccatgtgggagacaggttggagattccagaacttgctctttctgagactcaggctccagaaaatgaaagaaaagagcagctgccagggtccaaggtgggggcatattggagggggaccaccaagactggtgttgacaatggtgatgtgggacaagtgttaaccttgggtgatatggtgagatagctgtgggcagaaagcactgagctgaggtgcggtgaggagcctggggaactgtcttccaggaagaggctgcccacctcggaggatgggcctggcgggagaggagctgggcaccggatggcaccagaagggaagctcataggcctagcgcagaactaaaggcagtcatagccttggggagaagcaggaggccgtatgtggagggagggagggctgctgtgggagtggtggagcaggtcatggtgtgggcagagaagggaatgggcaagggtgcaggtgtgtgtttgcgtgtggactggtgagactggtgtcctgccacaccgagggagagcccaggccccacggcagtttcctgagtgcagagctggcccaggcttcatcgctgaggcctcccattagggctgctcctgcttccttccttgtggatgccctgggctggtcccacagcccagctactgagccagtctagaaacctcgctcctctaggactctgtccattggcatctcctggggtagggagcaacccaaggcttcctcccacagtttcaggcccaagtcccaggtttagcccaccccggcagatcaggaatttcgaggcttagtgggaagcccggcagtaaaggctggcctgtccagccacctctcgtggcctgccacaggcggtgaggggctctggagagagtgggtttctgctggtgcgtagacactggatgtagcgaaggggccctagatgtctctcttccagttcccccagctcttagcgcctcctcctctgctcccttccccctttaattaattctgggtaagcagcctggctttattgtgcaaggagctggggtctcactgtgggaaaagtcacaccttctgagcagcttctgatgccatgcaaatgaagggaccgtccaggaaacgctttcatctgcacggtctcctgtccagcccctagcccagtaattacccacatttcatttgtttgagagcaattcctgggggaaggcactgagtaggagggagtctggggcagggggtggaatgtcaggctctctgcctgtgatcctggccacaacgtggggccaggctgggccgaggctggtcactggctaaagctaatcctcatgcccccaggttggggaggcctgagtcctccagggtggtggcaatgggattgtgccatgtttacatcttggaagaagaagggagctctccagagagccagacctgccttctagaaagagacacctgaatagggaaaggtgaggtggagggggacagaagggtgggacctggtccttgaggttgcctgcagctttgggaagaggttgactcccagtaggaccccaggccagggacccatgggagctgcgcccagagcactggggctaggccaggctagagcacccatcaacttgtttatctttgagccgctgcctccacagagccctcactaacggggttttacagcccactcaagctgcaactggccaagaatcaatcattaccggcacttagtggtttgatagttaacagcctgaactgaagccaaactggttgttaactgtgataacaactgatttcaaggggttattgccggcccaatatgctcagcccatttatttcggggaaaacaagcagggagctgttgcaaggcccagaaaatggaggaggactgggcttctctcagccaaaaggccccctgccactccgtcccagagttggtgctggctgcgagggcctaggggcgggctgagggctgcttcaaggcttgaccgtgcacacccactgagggcctgcgtgtgagcccagccgacccacacactaggccctctccagccttccctctccccagtcctcacttcaattctcctcctgcctcctccccatgacgccccagaaggacggtctccatgaggaggaacccaggcccagtggccaggcgtctacttgtgcccactcagcagctggggctgcaccctctggctcattccttcctcacctagggctctcagagtcctgccaagtacaaaccagaaatgcctttcctttcaaagccagcaaagagtccacttgggtcttgactagaaagaatgagcaagagttctctctttccacagcaccaggtcccgcctctacccctcccttcctccctcagccaaatggaagcaggtgaggccagggtcaagcatcattctagaatgttgctgctacaaagggcctcaggagttccccaccctccacagatgacaactgcagcccagacgacccatggctagggtaaagctggtgctgtcctagaaattgggtctcccctcccagatccaggctgcctcctgcaggctgcaggtctttccctaattccattcattcattcagtaaatgttgactgagtgcctatgatgtgccaggctctgtcctgggtgaggggacagagcagaaaataagacacaaaaatgcctgttactctggagcccatattctagtgggggaggacacatcagtcagtgacaaccgccacatagaccaacccagattcaaaaaacaccttcttggattcttccgtttctagactctgacatccagccatctcaatattccagagaagaggatgagtgtgaagggtggtggcgattttaaacaaggtgatcaggaagaccttgtggataacttcgggtctgagcacactccatcagggtaagacattcccatacctgggggaggacgatccaggtggagggagcagccactgcaaaggcacactgcattagggggacaggaaggaggccaccacggccgcggcacagctaagggaggatctagggggtgtgcagttgggggttgggggtagtagagaatgacagaaactgaggtgaggtcacagagacagaaggggtgcagagaccttttggcaaagggcagatcctgtggggccattgaaaagacttaagcttgactctggatgagaccgcaaaccactgaggaattttttttttttttttaaacagagtccccctctgtcacccgggctggagtggaatggtgcgatctcggctcactgcaacctctgcctcctgggttcacgcgattctcttgcctcagcctcccaagtagctgggattacaggcatgggattacacacatagctaatttcactgagggttttcaacagtagagtgacatgatctgaattaagttttcccaaggttgctttggctgctgtgttgagactagaaggtagcagggcaagggagaccagttatgaggttaccgcaataatcaggtgagagatagtagtgaatggaagatggtcaggagagagtggggttttggacatttttcgcaagtagagatggcaggatttgctgatggatttggatgtggcttgtgcggaaagagaggagtctaggagtttccatggtttccggcttgagcaacgaaaaagatggaggtgtcattcactgagatgggggagattccaggatgggcagatttggaggggaagggtaggagtttggttttgcacatgttacatctgagctgactacatacgtattcaagaggagatgagtaggcagttgtgtgtgagtctggaattcaggggagaagtctagtgtgaagatagcaatccgggagtgttcagcacacagatgattttcaaagccaggagacaggatggattccttagggagtgagcagagatggagaagaggagccggccaagcctcagtgtgctccaaaaatttagaggacaggtgaagagggagaactggtaaagaagactgagactgtgtggcccacgaggtaggcagggggaaaagcagagagtgctgtggcctgatgacctaggggaaggacagaaggattctgagtccggagctttacctggggctagggaaaagtttcatgtcatcctgcctccctactccttaccccccactcaaccccagggctgagaggaggtggccaaaaaacggggctggtttaacctgggagcatcacccttgcctctcatcagcagttcctgctggcttgccctccagaacatctctccagtccaatccatccaccacccaccctatctacctatctactgctaccaccctgctccaagccatcatcagttcttgtctggtttatggcagtacccacccccaacctcaattgctcttcctggttcctgtcttatccccctacaatccattctgcactcagaagccagaattttcaagacgcaaatctgattgtgttactcccaccatacctacacttgaattcaaactcattttcaggccagcacaagcctctgcatgctctgcctgtggaactccactccttcccgccctccctcttgcctgctgctccctggacacacttcctccagcttctctaacaagcccagggagcctcagagcctttgcacttgctgttcttgccacttggaatgtctttcctccaaatcactggctggccgactgcgtgatgtgggtctctccgctctcactgtctgcctttttttgaggggcggggggatggaatcttgctttgtcgcccaggttggagtgcagtgacatgatcttggctcactgcaacctccgcctcccgggttcaagcgtttctcgtgcctcagcctcctgagtagctaggactacaggcaggcgccaccccacccggctaatttttttttgtacttttattagagacagaagttcaccatgttggtcaggctggtctcaaattccagacttcaaatgatctgcccgcctcagcctcccaaagtgctgggactacaggcaggcgccaccatacccggctaattttttgggttttttttgtacttttattagagacagaatctcaccatgttggtcaggctggtctcgaattccagatcgcaaatgatccgcccgcctcagcctcccaaagtgctgggactacaggcaggtgccaccacgtttggctaattttttttttttttgtatttttagtagagatgaggtttcaccatattggccaggctggtctcaaactcctgacctcaggtgatccacctgcctcggcctcccaaagtgctgggattacaggcgtgagccactgtgcccggcctgtgctttattttctacgttacacttatcactgtctgatcttatcctgtttttttatttacttgcttttggtctactctacccttacctcccaggagagcaggaactttgtttgaatcgctcattgatgaaagcccagtgcctataatggtgcccagcacatggtgggtgttcagcaagcatttgtgcaagcaatccacatagagcaggttctgaggcagctgcggagaaggcaggctgggagtcctctgtatccaggccatgggtcaggcgttaggaaatgtctgaagggcagggagacctgaggatggtcctgggatgggtgacttctcttcgcccatccgacatgcactgcttactgaaaaaggtccaaggctgtctggcacaggccccccatcattttctcaagctgcaacaaatgtctccaaaacctggacaggcagacatctaggcagggcctattggtctggacatctcagaacctccccaaattctgctttcttcatcgccatcaggtttccgtagcaaccagaggacttcacaggagagagtgaaggggaattaagagccagagagagcagaggagagaggaggagtaagtggtagcaagacagatggggagctggcaggaactccagggggatccccaagtcccatgttgccgtggagggttgtgccaataggtccctttggttgcccccttccccatctggatctcttgctgaccctcaagaagtaactgtccatctgggcaggccccagagctgacccctcatgcaaaacccaccccctccctgctggcaggccctgagcgaggctccggctccctctgcggtctagctccctccctagcccctctcttggcaatagtggaactggctgcagcccctgggtgggtttggggagcgtttcctgccattccttccctggccgtgtatggagcagtgggtactgggggaggacagtcagcattctgccctgctgaccaaggtccccaccattggcatttggagatatggccaggtcccccagtcatgaagactcagatgggctgtaggtaagggcctggctggaggtgctcagaacaagggcccaggcctgggcatggcattcagggagcacagagaagcctgaatagagctctggccagtgtgctgcctcgcattcccttgaccccataggtccggaagatgcctggcttgggacccgagagtggcagaatagcaaagcctgcagcagccacagcactgtggtcctgagacccaggccaacttcctagaggactggtcggtgacttcagagggtaggggtggcctgggccaacacccaattccagctgtccctctgcccccatacatgcagccccccgaaaacccagattccaaaaccaccttcttggactcttccctgtttctagcttctgacattcaatcatctcaatatgacaaatatcaccaagtcctgcagaatatttcttcacaaagaactgccccctgtcccatcataaagacacctgggccaccccatgctcttccaacccatctccctgcccagtctctccctgggctttttctataccctccccctcccgccctctgcaaggagcccttggtaatgaagagcaaactcataaaacattcatcctgggtaatacaccatgtaggagctgcctgatctcagttctgatagaacaggccaggtcagcaggacgctggggcttaggcttctgagggtttgggctgacttctctaccttgggctcaagttccagccacttcccttaaggcaggtcttatcttccctggggtgctgggggtgggggctcctgagctgagtggcagagggggttcctgagaagggatgagagcagcccagggagggagggtggctgctaggggtgtccttaaatgaggtgtgatgggtagatggggctctgggaaaaagagcttgacgacaaggtgagccgagtgaccaaatggctaaagccacagctttgtgctgagtgtggggggcggtcagagcctaagcaggtggtgtttaaagttgctattttggcctgggcaaccctggtatgagtgtgtacgagtgtgtgagggatgagagagtctggtatcggtggcaggccctgtgcaagaacccggccccaggaagcaggcccccatctgggcactttcatcagaccagcggggtaggtagacagagggaatggaaagcaaaggggattttccttgttttcactcccccccacccctggcatttgctctgacactgctgtggcatcctccaggcctcagcagagtcagagaaggaagtcagaggaatggccacagggacagccagaaatcagaagtggcttggtgtgagggtgaggggcaagggctttggagtccagcagccctgagcttgaaccctggctctgtcactgcctggtcatttaatcggggcaagtcagctcacctctcccagcccccacttcctcacctgcacaacagggaatcactccaccataggagttgccaggactgagttaaaatgagtgtgtcgagtgtccagcgggtaccttaacaatgcttcctaacagtgatggtggctactgccgggaaggaatctgggagacggggtgggccacctgagccaagtccctgggagcccaggtttgcacagtggcatcatcagagagccaccgaggagcagagtctgtaaggaggctgcttccctggggaaacagctctggcagccgagggcctaaggcagccaggaggctgggaaagaggctgggcaaggtccctcatgcacaccgagactggctggcctctccccatcccttccactcatccaagcaggtgtggctgccaaaggccccggcccctgaaggcctgggagaactgagatggacggatgatgtggtggctgcaaggggatggtttccctgcttatcccgggggccagtgtgcacgttcttgcctctctgtccctcaggcctggctttgcctcccacccctctcactccaaataagcccaggcaaattggcgaaaagtcaagcctgagttgctggagttgggaaaaacagaacaagagagaagcactgagaacacagctgacattcaaggctctgacctttcctctagccaaatgcgaaggctttcctttccctagtgccttgcgttgattcacgaagggtttactgagcacttcctacatgccaggcagtagagtgttgggaagcaatggtgcacaggttggatagatccctgactcctaaggcctcccatgtagcagatggccatggttagacaggccttcctgatgaggagtggggaaggctgagacaggaagagcagggtttgtgtgaagacgctggggtttaggggatgggggcaggaatgctgagtgtgctggccatggctggtttttaggcagctgaaaactggtggaagacaggaccctgggctggttctgctggagttcagctccacttggctcagtcccagttgaattccatgcacactgagtattgaattactggagagagcagggtggatgtggcaaggtccctgccttcaggctggcccatgtattgggcttcccagagtagtgaacctgagtctactacacaacatggcgcaggtaacacgtgggttagcaccaggcactgtgcttgcgtggctcacaagcgccttcacagagaagacagacgagaatggaattgctgtaggatcctccgggaaacttgtcttttctgaaccttaatttcctcatctggaaagtaaaaggtttgaattagattatttgcttaaaaattttttttagcaacagaaacttttttcctgagcaaaacctgtatggaagc

SEQ ID NO: 579 - DNA, 658 bp, Homo sapiens
ccatgggcagcccccgctccgcgctgagctgcctgctgttgcacttgctggtcctctgcctccaagcccaggtaactgttcagtcctcacctaattttacacagcatgtgagggagcagagcctggtgacggatcagctcagccgccgcctcatccggacctaccaactctacagccgcaccagcgggaagcacgtgcaggtcctggccaacaagcgcatcaacgccatggcagaggacggcgaccccttcgcaaagctcatcgtggagacggacacctttggaagcagagttcgagtccgaggagccgagacgggcctctacatctgcatgaacaagaaggggaagctgatcgccaagagcaacggcaaaggcaaggactgcgtcttcacggagattgtgctggagaacaactacacagcgctgcagaatgccaagtacgagggctggtacatggccttcacccgcaagggccggccccgcaagggctccaagacgcggcagcaccagcgtgaggtccacttcatgaagcggctgccccggggccaccacaccaccgagcagagcctgcgcttcgagttcctcaactacccgcccttcacgcgcagcctgcgcggcagccagaggacttgggcccccgagccccgataggtgctgcc

SEQ ID NO: 580 - protein, 211 aa, Homo sapiens
MGSPRSALSCLLLHLLVLCLQAQVTVQSSPNFTQHVREQSLVTDQLSRRLIRTYQKRTSGKHVQVLANKRINAMAEDGDPFAKLIVETDTFGSRVRVRGAETGICMNKKGKLIAKSNGKGKDCVFTEIVLENNYTALQNAKYEGWYMAFTRKGRPRKGSKTRQHQREVHFMKRLPRGHHTTEQSLRFEFLNYPPFTRSLRGSQRTWAPEPR

SEQ ID NO: 581 - DNA, 93538 bp, Mus musculus
  misc_feature (1)...(93538): n = A,T,C or G
ctctctctctctcctcactcactatttcccactgactgaaaaatatcacaagggaatggagggatggttcagtgtgtggcatgcttactgcagaagctttggccctgagtgttggtcactagtgctcatgtgaaagcaggcatggcggcaggtacctgtagctccagtgctgggcaggaacaggaggattccgtgggcctgctaggcagccagtctagctgaaacaagagctctaggttcagtgagggaccctgtcggaaaataggaggtgaggagtggttgagaagggtacattgacttctgaccaccacatgcatatgtaagggcaagcatacccacacatggatacacacacacacacacacacacacacacacacacacacaagatccagaagaactaaaagaaaacaaattacactagctcatgaaaattcttgagactacaggtatataccactgcgctgggctcttttgaacattttcaacgtaaatgaagtgggttgatgaaccagcaggtgcagctgggattcagggtttatagtataccatggccacatccagcttatagtgataaagacatgttattttttgagatttttccttccaggccatggcttcattgcctttgtgccaatggaagcatagcatagcacgtcaggagcccatagtagaggaaactgctcaccccacggcagacaagagtgagaaataggaagagtcctggccccagcatccctccagggcacgcttctaagactggactcacacagaaggccccacctccataagggttctgccacctctctacagcactaggaactcgtgagagcaagctttgagcacatggacctttgcaggacattccagatccgagctgtgacacccagcagcgacaaagatgtcttcacgttgctgctgctgttactgatgacataagccacctctccgacctttagctccatcctttcctccgtgtgcacactaactgactccagtgctacccaacctttagaagacgtagactttcccccaggcttgggggaaacactctcatgatcgtttgaatcaacagctgtgcatggagattgggcatgtagcagagccactaaaaacctccccagtgtctgcagccgcgtaatgccagagttttgagagcctgctgcaggagactccgggtaccctctcccatgtgcaccgtgtgcttcccaggaacacaggtttctctgtagcatctatgcccatatgtgataattacattggctcatattttgcattcattggggatgtgtggggtgggggatgtgaggctcctcaaagaggccagccgtggccccacaccaacctggacatcagcatcggttggaatgatggctacacttgcagaaagaagtcacctccatcttctaaaaatccttaattcaggaggctgaggatagatttttggcttacagctttttcaggttaaacctctctcagtttacagtttcatcacaaatccagaatcaaacaccacctttaaatactggattaagtgataattataaacagactaaaatggaccatgaaacacgtgaccattgttctccgttctgtctgtctctcttttgagatggggtctctctgtgtagtcagtgctgtcctggacttcaatatgttgatcagattggccttgaactcacagagattcccctcgtttgtctcccaagtgctaggattaaacaaccaccatgcccagctcattgttctctttgagactgaagattcaagaaatcctgggtggaccagatggctcagtgggttaaggctcttgctgttaaagttgggcgtcccgagttcaatccccaaaacccacgtggtgggagcaaggaccattcctgttagttatcctctgacctccatagatacatatttaaaaaaaagaaatcctgtcatggaataaatatcctgtcatggaatacatataacagaagggggcgctgttgctccaagttcccaagctgttggggccctaactttttttttttttttttttgaatgaatgaacaatatgctagctaagaacattttggaaggctttttcttctacctgtctaaggataaaaagataaatctctagtactaggtacagcccaagaacaaagtgaagggaagtactgagtgtgaactgaatgaagaggttctgaacggacgttgagcagccctcaccctaatgctcacaggcaagggattctgacttcagagtggttttttgttgttgttgttgttgaacttttacatgtgtacaatgaggaatatttgacgtgagactaaattcacttatatctcatatatgcttcatttacttagtccgaaagcaattttaggcactattttaaatcacttgtgaacaagtcaaaatgtggtgttacggagtttttcccttgtggcatttgtcagcagttaaagagctgcagattttggaacacatggaattgagattttcccgattaggcatgcccgccctgtgtcggccctttaatgacttaggaagattctcagtagtatttctctattgggagaacacagtggtctataaaggaaactacaaagcaagatgcgatttactcttcgcagttttgactttagtggactgtcaagaggcaagaaaccagacatgcaaaggagcgttttggcaattcctgcttccagcccgggctctccagctgtggctggtgccatcccgggttctccggctgtggctggcgatgatcagggctctccggctgtggctggtgccggcccaggttctttggctgtggctggcgatggcctaggctctctggctctggctggtgatgtccatccctcagttgacttcatttctctgggcctcagtttccactcatgcaagacaaagacttgaataaattgtgatgtagaacccatcgtcttaatgagctacactgtcaatacttgagagaattaaatctgttgatgtactttgagtatcgttttgtggttgtgaaatcctcacataattaaaagccagaccaagctgaagagagcagctcctggaaatctcactcaggcgcatccttcttctcagaccactcgcttccccggctccccgggtcctcgcttttatttcttgcattctgtgtaaagacactaaggaaatgctttttgtaactgctgtgtgtgtctcatcatgtccgattctttctgactcgtgtggagagagctcttcactctgccttacagctgcaggacacagatggttccaatttgagaaagggagcaagccagaggggtcaagaacaccacagaagacctacagagccaactgacctgggtccatgggagctcacagagactcaaccaccaaccaaagagcaggagaggctaaacctagacccactacccacttgtagcaaatgcacaacctggtcttcacccggtcccctaacaatcggagtgtggactgtgtctgactccattgcctgccatttgggtcccctttcctacctagactgcctggttgggcctcagtgggagagaaggtttctagtcctgctgggactgggtgtcctagggtgaagtggtacccaaggggggcttccccttctctgcagaagaggggataatagggggagagacttgtagtggtgggactgggaggagaggagggagaggggctgtgatgaagatgtaaagtaaataaataaatacattattggaagaaagagagtgtagcttctgggctgtttttttttttttcccttctcttttctctagcatagggcaagagtaaaatgcattcagtagaaaccgcacttcgactttcgttcttttcctagactggtgatctgtgatcagtcctctctcctgatgctggactgtacgctcaccccatcagccacataattcctaggggagacaatcagcttctggtgggtcctgtagctagctacactggggtgttttagtacactaggtacattccacagccttcccacttaaaacagttccaacttacaatgggatagcagaacataaccccatcacaaatagagcagcaactgtctccccattcacagtcttacaaatggacatttggtttgcccagttcaccctcacacacaatggagcccagaataacccatccaagtggcactttgtactggtgtggatgagggagaattcttagaagtgagattgctaggtcaaaagctaacgtggaggccaaggaggtgggtcagtaggtaaagttcttgctaggctaatgcaaggcccaattaggatcccttgaaaccacatcaaaacagagcagcagtggcagctgcctgtaagcccagaaaagacaaagaaaggggatccctgtggcaagctggttcgactagttgattttgagaacgttgcttctgttgagaaactgtgcctcaataaataaagtgcagagtaaccaaagaaaacacccaacatcaacttttaggcctctatactcaagtccacatgtgtacctctcccgggtatgcatgcactcacaccacaggctaaggaagggataagtaagtgccactgccactactgacgacgaaaaacttggcctcaaagtgagtcacaaagcacatctcgccctcattcctgacacctctcagaaaggccttcatttcttggctgacaacagttagcacctactgggtaagtggtaagacaagatgacctagcactgttaacaggatgtgtaacatgggtggatcacttagcagccaaagatacccggtaaacgttttttcttacctccaaaattatactttagatgtttgtagatccaaatgtcttctggctcaatcagtagcagaaggtttcctctacagctcgttagaccactaaaagcaaagagcgtttgctctctacttctgcagtggctccacaaaccaccaggacctgaaccttcaggtgactgtgctctgggtcagctcaccgagccctggcatgagtcaccagctgacaagcactgggggagtgggatgcagaagggagaggtgtcctcctgaggatgggaccattgctcaaattgtgcagttgtggaaactctggcctcgctttagagtaatggcatttaactgatgtttagttatagatctttctttgctaaaggaggatcaagcctttgactagagcaaaccttgtcatgaaggcgtcccctaaagacatttagactatctcctgagtgtctgtgcatcaccacctactggttaatcttctcatctggctattctacttcatctggctggctgccagtgctgtgctgtgtcttctagctatctgtctctgagatacatgtgtgcacctgcatgcttgcctgtataagaaacatgcctcacagaaactgcatatagaactcacaagtagaccaaggatgcatgaggtgcctgtgatggctaatcctggttgtcaacttgactaagtctggaatcaacggaaaccaagattcggggaaaccaagaatcggggaacacctgtcttgatcggatactttgaggtgggaagacccaagctaaatctggtctgcaccttctggtagcagcccacataaatgaagagaagttttgctgctggccctcactttttatgtcaaggtcacctaccccgctgctaaggcattcctttcctgatactagtgcctacttctttgagaatccagcagagacacccagcttcattgatggaacaactaccagatggctggaccttccaatgggagacagccattgttggatcagttggactacagccagtaagcaaatccaataaacgtcattctaacgtatatagggtctactcattctgttcccctagagaaccctggctaatgcaagcactaaggacgtcctagctgacaaatgtcacatccgcttctgtcaggcagctgtaacataatcaacaatggattgtcatttcctgcctcagactggaaatgctccaaatacagggaaatattgaggaaaaattgggggggggtggtattgggaattgaacccaggccatgtgtataataggcaaacactcagctatacctgaaacccttccttccctcctcttccccttccccttcccctccccctcnnnnnnnnnnnnnnnnnnnnnnnnnnnnnnnnnnnnnnncttcccttcccttcccttcccttcccttcccttcccttcccttcccttcccttcccttccctttcctttcctttcctttcctttcctttcctttcctttccttatttaagtttgaaacaggatcccagcaactttcccaggccttgcactgacagtcctcttgcctcagctaggagtgcaggcatgtgctctgaagaatgactaaggataatgaggctcttgactgtgagtttaaagtagtgttagtactgaagcaaagttccactgaactaatcagggttaagtggtgttattagagtggccattgcagttgttcattacaggcagcagacagaacctgctgaaaaaacaaaagaagcatttctgaacgtttaactttttttttttttaaagatgactgcttttccagggacctctgtttgaggcttgagtccagttgctgtgtctttaaggaagcttgtacagggaaccctgtcagctatttgaggcatgctgccaacaaacaattgaggtatttgccgaaggtttccaagaaattgcagcaaatcctacaaaatgttatacctgttataaagaagcagtcacatgtattagcagcagaaaaaaagtgccacgtgagcgaacaaagctgccatctgtgagagcaggggacgtaggcagagatcagtcttagttacatcataacgaattgcactcatgcaagcagaaaagtaggtgagctgccacttgggcatacattttgaaacaccagcctagagctgctaccacggagcccttcgggtgctgcagtgggaacacccacatagaaacaaggaactgacagatcccaagactctggacttggccaggtaggactcagtgtggaactcacatcccattccgggctagacatgcatccaggtcaggtggtatgtgtgctatcaaacatctacaaggggctagcaagatggcttagcaggtaaaggtgcttgccaagcctgatgacttaagtgcgattgtcatgctccacagagtggcgagagcaaaccaactcctcaaagtttccctctgaccgccacacgggtatcatagcatgagcatgaacacgacagacacacactgaataaatgtagtaattttaactctctgaggagcgacgcagggtcatagcttctctattcatcagttgttgacttggtaactgacggacttctaggaagcggggagctgggaacaagatgttcaacattctcagcaaattcctgacacacacacattcctgtcttttcattggacttaagtttagaaaatatagacccgtcgaaagcaggcttgaagatagtgagggcattgactatgtcacagcgtccaacatctgtgtcttgccagatttgcgctttatgtaaatcagtgtgaattatgaattatggggcagctgctgaacttgggggctctggtgacgtcttggtgtttgtggttatggtcttactggaacctttctctatggtttcccagcctgtaattcatggctaggtgtcctgtatttcccagagaccactgctggaatctggtcttcactacacaatgaatattttatccttagatgtggaccatctcttacagggagagtcaggggaggggaggcgatgaactatttttgaaataaatcacacgtgtcaaagaaagtggtactatccaaagaataaacaggagtagccaccattcagtggtggggaggactgtgcttcacacagctttgtggcttaaactggaatatttctgttgtttgatttattaatcatgaaaaggagctacaagaataggctgcccatccacccaccccaccccaccccaccccactcgaagcactcttgttttgttgttgttttaatatttatttattttatgcacgagtacactgtcgctgtcttcagatacaccagaagagggcatcggatcccattgcaaatggtcgttagcccccatgtggttgctgggaattgaacctctggaagtcagtgctcttaaccgctgagccatctctccagccccattttctatctttttgtttgtttctttgattgattaaatgagaacttcttaggctctgggaccgtagttcagaggatagagtactggcccagtgtatcagaggtccagtggctgatccctggcaccagggctggtagcacacaggcctggaattcaggtgactccagttccataagcaagaggatctggagttcaaaacgatctgcagcttcagctagcacctgggctctattagagcaggtccaagtggctactttgcgattataatcctaacacattggtgactaagaaataaaattggtatttacaaacatttgtcatgtgggcacccaagttgaagggctttcgtttttaacaaaacgtataaaagttaagacagagcaaatatagggaaactggtatccaacttaaaaatccattcagcgagcctaacttacttggagacctccagaatagtaagagatcctgtttcaaaaaactaggtgtatggctcccgagaacccatcccccacaccacgtacacaatccatatccgttttataaatctactcttaaaaatactgacagacttaggtgaggggggtactaaccagctctctgctcactgggactaaatacaggtatttatcatctagtggtaactcacccacccatctcttcaatatccatttaaaaaactaatatgccgggcttggtgccgctcgcctttaagcccagcgctcgagaggcagagacagatctcagattctctgagttcgagggcagccctagctacttagcgaattcacgtttcgctccccagcccgcaaatcccctagcgttcctaggtgaactgtggccgtgtgtggctccagccccgcctgcagcgtacaaagctgcagtgtggaccccgctgtcctggccaccgagtcgggaggtcggccgggggagggaagggcgtggcggctctcggggcatctggggagccggtcaactcagtccacgtgcggtgcgggaccgccggctcccaatgctggcgacgggggcgtggccgcgggtaccgggcagtgggggttggagggacgcccgccccgctgtcgtcgatgctatcccacgcccctcctgcctggnnnnnnnnnnnnnnnnnnnnnnnnnnnnnnnnnnnnnnnnnnnnnnnnnnnnnnnnnnnnnnnnnnnnnnnnnnnnnnnnnnnnnnnnnnnnnnnnnnnnnnnnnnnnnnnnnnnnnnccacggcacgccgccggcgggccgcttcttaacgcgcggtgcgtgacgtgaggggctcctttgcaatggcgcgctaagccggaggatgtgcagctgcagaggcggcgcagggcaccgagagggcgggcgcagcgcgagccgagccgagccagccgggggacgcgagccgcgggagccgctgtcgcctcgcgccggagtcgccggccgcgcgcgcggggcatggtcccctcttaaaggcgcaggccgcggcggtgcgggcgggcgcgcggaannnnnnnnnnnnnnnnnnnnnnnnnnnnnnnnnnnnnnnnnnnnnnnnnnnnnnnnnnnnnnnnnnnnnnnnnnnnnnnnnnnnnnnnnnnnnnnnnnnnnnnnnnnnnnnnnnnnnnnnnnnnnnnnnnnnnnnnnnnnnnnnnnnnnnnnnnnnnnnnnnnnnnnnnnnnnnnnnnnncggcgatagggcgggctggcctccgcgggcgggggcggtgggctgagggcgcgcggagcctgcggcggggacagcgggacagcggcccggcgggcggaggggcgcgggcatggccgcgcgcggccggcgcgcctggctcagcatgctgctcgggctcgtgctgggcttcgtgctggcctcgcggctagtcctgccccgcgcctcggagctgaagcgagtgggcccgcggcggcgccccagtcccgagggatgccggccagggcaggaggcgtcgcagcccggcggggcgcgcggcgatgcgcgcggggcgcagctctggccgcagggctcggccgcggagggcgtcccgcgcgacaggaactttctcttcgtgggagtcatgacagcccagaaatacctgcagacccgcgccgtggccgcctacaggtgagcccccctttcgtggatgccatcgccggcatccggcatcctggctggcgggcgggcggcgttacgggttccccggaggcttctctggtagctgccagcggctcagcgcaaaggcagcagggcttaggatggtgagcatctctcaagggcaaggctttgggattgagtacgctggcctcagtgtgtgtgcctctcaacctcatctccagggagacacgtaagctttctgtgttcaagacttctttgttaaaaggaacgagtctcccccataaggtggtggcgaaattcaatgttgtacctgcgatagtggaggcagagttataatttgagtctctaaaataggcactttgtcatttcgaagggagagcccgcttaaattaacctggctagggctcctccgtactgtactttaagattctcacttttggtgagcgtttccactctgcctttgagcaacactctggtttgttaagtagagaaaaagaaccttgaggaaaaacagtttgtgtgatcgatttagtcattgtaagactgcagcctggtgttccccagcgcagccaccaaggcgtatgcgtggtaggaagtaactgggccctagtaggctaaaggagtcagtagaagtggcagcgatcatgttcaggattaacaaagggattagccaaagctgcctttagaaaaggagatggttttagagtggagggcatggttagaactgtatttgcattgaagtgaatctgaaatacaagaggggtagacccaggtgaaggaagggactcgtggaaacttttgtgtgtgtgaagtacaaaaacctttactgtacgggtgaagtctggcgttcttccaggcagagactcagtggcaggaatggtttcagagcacggatgttctggggctgagctttgtgagcagggctatactagttgatgtttgtttttacattttttaaccagtgcttttataacttggcttttgaatccagtttctggtctaagttttcaggcagcagatggtataagaaaacaagcatggctggatctcttctttctttaactcaagtgagggattgaggaaagaggagttaaagcgtttaaaggcttgaccaccattcctgctgctaatgtccagaggctgcgtcgtgctaagaacagttctgaatggccagaggccacaggtggcaggctgtatgtggactagcggagtagtttgagagcaagtaggctatagttctccagatgttctttgacttaatatctttgtcaaaaattgaggaccagggctggtgagatggctcagtgggtaagagcacccgactgctcttccgaaggtccggagttcaaatcccagcaaccacatggtggctcacaaacatccgtaacgagatctgatgccctcttctggagtgtctgaagacaactacagtgtacttacatataataaataaataaatcttttaaaaaaaattgaggaccagatgtggtggcaccagtctttaatcccagcacttgggaggcaaagcaggtggatctctgtgacttccaagccagcctggtctacatagaattccaggccagatatgactaacactgagacccctctcaaaaaaaaaaaaaaaagttaagcaaacaaataaacaaacaaaaaatgagaaaaggacccttccctcctttggttgagaaggtaaagatgattgttaagaaatctgacaacctgagtttggtcctcagaaagatctcacagggtaggagagagctgactctccggaattgtccttttgactgtcacacctctgccatgaggtacatttgcacggccacacaacagatacttgtagataaaataaatgccctttcagcaataaggctaaattgaggaaaaggccactagattgtgttgtggttttgaaaataaatccatgaaattacagtttagtgacagatgacatgaaatcataactctggggacaattgccagagtagtttgttcagatagatgatatgaccacccctccacgtacatttttattcttataaaatcagtatacacaagtcactagggatcgtgcctgtgataccaagaagtatacatgtatagtgtacactagttttatagctgaccatggtttcccaaacctcatcttgccaagttaagtgtgtgtcatcctttctgtctcttctttattgttaagattttctcattgttttcttttaggcagtggggacttactctttatctgtgatctgaagaaagcagagcacatgagacctactccctgctgctcagggtccctgcctctcagccctgtagttagattggctagccttagggaaaattcaagggaggcctgagttgggagagggaggtggtgaggtggttacagcctggcgtagaagtccacactgagctccatgtacagtactgtgttaatgtagtttgattcttgaatcttgtagcataaaaagtggagcctgagtttgtgtgccacccaccatacctggctcattcttcatcatatgagaaactcccagcgttcaagagatagaggcaggcacaagagatagaggcaggcaggttagaagttcaaggcccagggcctggtgagatggctcagcagttaagagcaccgactgctcttccggaggtcctgagttcaaatcccagcaaccacatggtggctcacaaccatctgtaatgagatctgaagacagctacagtgtacttacatataataaataaataaataaataaataaataaataaataaataaataaataaaaaaaataagttaaaaaaaaaaagaagttcaaggccccctgctccatgagacttggtcttcaaataaacaaaacctccttcagtttgttgtcctcatctcttcctcatcctctaatttaataaaacagttgtttgccttataggtgaaggagatgccaacacttctagtaagagggcactgtggtataagattgataaagtcagaatttgtgctttgggactagaaactagcaaccttttccttccgggactgagatcaagaagggagccaagaggccctagaaaaatccaggaaggtacacttgtctggactaaagttactgtactgtaatgctttactgatggaacaactccacttctatatgctctgcctttgtgcacttgaagtgcaccgagagacagctgaccagtggtagctagtaggagaacagttctaaaagtaggtgggatggaactcagaagtgcacggatagagaccatctggagccaacttttgtagatctgtgtaactgcctagctgctaggctcacaggagtgatcctggctcattcaaacgttttaagtgcacttaggtacaggtcagccctttgtaaagcaggtgacccgcatggccattgtggatctaaaactcaattttgaaggcacagcaagtcagatgtctgttctgctagttgtattaaaagggactggctctaaaaaggggttgggccagtgatgggagaaaatagaacaggggtgggcagggtggtgtcctatctgtattagctggttgtgaaggctttagagaaaggggcatttgtaccccccgggtcagatagtgaaaggctggttgtgtgactatcactgataaacatattgacaaagggaaagcttgatgcagagaggcagaagccaagttggaaggaaccccaagaaggccataaaagaaggaactgggtctgactgttcagactcacggaattacattctgagtgagtggaaaagccacttgaagctttgagcagaaagggaaatgggtagctgagactataaataaggaaaataatttgtgtaggctcatttgcaaagttatttgtctattatgtatttttactttaaaatatcatgattcacatgtagtaatttggtgtgttaattatcaacaggttgattgggtgtctgaagttactaactgtagttcatattatcttgatttttttcttagtttttaaaattatatagattctaaatagtcaagtaattaacctgctttttccattattattattattattgttattattattatgtatatggctgtttgcctgcatgtatgtctgtgtatgtgtgtgcctgtatccaaggggaccagaagatggcctcagatccttgagactagagttagagatggttgtgaactaccatgcaggtgctgggaacaaagccaaggtcttcaggaagagcagccagtgagtgcacacctcttgttgttgttttgtttcctgagattcactctagtccaagctggccttgaattcttagcgatcctcctgcctctcaccctcctgagtgctggtactgcaagtagaagccactgcttcctgttcctgattttagatttccctccttaaagtcaaaaaggtattgtcttcaaaaggtactgtcctgtgaaagttcttttgagcatgctgggtaaataactatcactggacaacaccctccacccttttgagttttcagatgagacagggtctccttaagttgtctaagctggccttgaacttgccttagcttccaggtagctaggattacagcctttgtcaccaccaggccaggtggggagtaatgttgaggaggggattttttcaaaggaagtatttctttttctgctttgagaaggagaagacagccccagccacgtcaggtggctcatagctgctccagcctccaaggcatcagtgctcagacagtttacagtcttaggaaaagaaatcttgttaagtagctgaccatgaccttcaggttggtattctcctgcctcagacttgcgtcctgaggtcacagacctgtttgctggtatacccagctcttttttcctcatctgtttttaatgcttagaacactgaacttcagttggagataatagcccaattagtaaagtgcttgcaaggtgcaaggacctgagttctagtgtgggacccaggtatggagggggatggcaagactcctggggcttactggacagccaacttagcctgtttcaagaagtggacagctttcatgaagatgatgcctgaaactgtttttagtcttgtacaacacacacacacacacacacacacacacacacacacacagaaaaaacattgagctatcctactaacacctcacagttatttggatcttactgcccctggcctaaagatgggtgacagtttttgttgttttgttttgtttgtttgtttgtttttctttattttgctatttacttcccctgaagatgtgactggctgccggtttctgtccaggaatccaggagtgattagcattagtgtgtgggaagaaaagtgagaacaggactctttggatagcttttatcagttaatgacccttcctaatgccttgaaagtaggcagactgttcctcttgtcagccttaatgagcgtctccataacaggccagttgttctcttccatgcagtccattttagcaaacatttggaaggtgtttacatgtaaaaatccaaataaccaacttttaagtgtgctttggagcacaacttaatttcaagttgtgaattacatgtagaaagagactggtgaaagatgtggtctggagatgagtgtgatttttatctgtctgtgaaagtcggaaggtctctgatgtccgtcctcgtgagattggtgcggtcgccagcaggactcaggtgatttcgctgttggttattgaaagattactaatactgggctgtagccccacagggcctagtttagatgaagagctgaagactgttgagtgacaagggctcacaaagtgtgagcagaagtgagcagaaggaggggcatcgagcaagggcaggctgaccacactcccacccatcctcctcttctgagccttgaagaacgggtaggagttttaaagacagtgacaatttcaggttttctaagtcatgacgtagcaggaaatagtagtggtgggtgatgagaaaggagagccgtgagctattggaaagtgacagcaggaacaccaagggcctgtgagggaagacacctgtgtgctatagaaactgatggcacggccagccaatgtgtggttaagtgtgtgtgtgtgtgagagagaaagagagacagacagacagagacagagagagagagaggacacagccagaggcatctggaagagtccagagcagagatgaaaagtagactgagcacagactggccagggctgtctgagagaacagagaataacagcagggatagagaacagggaacctagagagaagtgggagcggagaagctggagggctggacacagggagaatagtgggggttataccaaaactgagtaactctgcatggaaacccaggagctggagggagtttagctacggaggaggtgaaagggctaggtgtgttaataggcaccacaggtattcacttgttttggtagaggggaaggcctggtggatgctggcttagatctgaccaccagaaatcctcctacagcccattagttcgtatagttaataggttgagcccattttggaatatttggattgtcttttggagtttggggaattggagtttcctctgggacatcacatgcaccagactcaggaacccgagttgtgtccgtggtatctcagcgtgagagtgattgatgggatctgtgattggaagctcagctgatggtcttgctacttggaggctggttgtgttaagctttgttgagtttgtttcttatggcaatgtctacacgtaagtgtgcaggatctgtgctagtaagcaagatctcacaggagggtttgagtcaagtttttttttttttggcttaagaataaaacccaatcacaatctaaaggagtttttctgttgccaagccaggcagacaaaggacaggtggaagtggaggctgccctccttatctgagaggactgtttcctgggtcttatcgtcgctccggtcctcactgtgaaataaaaggagataaccaagaacaagtgccagtgagaaggtgggctggcccagaaggctgcagagggccacctgtttgtccacttggctggtactcatgagctgcctgtccttgctggccctgagtttcctgtggtaatgatacttcagagtcctccacctggtaagagtgagaggctgtagagcagcctgtgattgctgagtgaaggggggcgggtggcagctggtgaacaggctgattccaggtcgcacctcacagcacaggacaccgaggcacaagagagcctgggatgcttctgctgtttgcatcacttctttattggctcgtttgtttgtttgttctaagaactgaaaaatttacattttgtgtatatatactatatactcatcccacccccagcaaacaaacaaacaaaccagacaaaaacacttacttgggcctaataagaactgtagctcaggaaaatcaagaactttaagtatacaacagcagtacagaaggtgttcagagagctctgtggttcttctcacttggagactggaagaaagccacgacacatcttctctcgtttatactctgcgttttaattcttaggtttcaaaataaaaaaagaaagaaagaaagaaagaaagaaagaaagagaggaagagagagagaaagagagaaagaaagaaagatgtgttatggtctcctggtgcgtgttcttgttgctggttgtgaagctgggttcagcagactggcttctaatacttgggaatgtcttctgcactacttgtccagacctttgtcgaagtgggagggtataagaaaagggcttccctcccctccttttagaataatacagcccaactgggtatcttcctgcctcagtctcccaagtgcttggatggtaaagcaaacatacacttttatacttgctttcccagtaagtctgtttaaagatcagcagtaaagagtataatttaaccttttaaaataatttctccactgttctctattctacttttcacctattcctgtaacagcttgagattactcatgtcttaggcgcagtgagtcagttgacttgagaggaaaccatatatacccagaaaccacgaacccatagggatgccaaggactgttaaagtagggttcctatactgagagaaaaacagcccttgtcagttagtgactgagtcctcccaggtccctgtctactctgactgactggaccacagcagcttccttctgtacagcactttgtgagaggatgggttgagacggcctgtcctcagactgcttcccacagggtgcttttacccaccttccctgagtgggcccggaggaggctgttctcctaggacctcatgtctgaggtagctcttacacagaaccctgaactaggacagttttgtgacatctccttttgcctcctggacagcttagctgaaagtgtgggccgatgttagcacacacaggtaacacttcgatctcaggtctgaacacaggcgcttgctcaagcagaaggtaggtacctcctgagcgtgctgaagctggccgtttgccctggcagagcacagggcagagcaccctatattcgtcaagattttcccttcctgctttggtctgggccacccctcaccttcctctctctgggattagtctcctgctcacttttctccctatgcatgcattttggctacatgatcttaaatcctttccctaacagaaaggattgtgttctctcaattcctagtgtccatcagttctacaagcattctgtcttcctgcttagactccagtcactcagccacaggcctgagaaactgtatcctcggtgattgtagctttcaagcttagcacgctgtaaccagcaggcgacgtgtgtaagactggtttgaggaatagaaagtcttcccgcctttctaattaggaaaattagcgtaactattaaaatgtagaaactgtaaaaggaggaacttgatcttaggccacttttctttgatttgcctgttggataagattattacaaaataaactgttctgtcgtctgttttttcttgttacataaagcttcccctggggaattccccccccataaatatacctatctatcatagaaaatgtagaaaatacaaagaaaattaaatgttttaattaaaaaaaattttttttaaaaaatatggaacacttcacaaatgtgcgtgtgtcatccttgcgcaggggccatgctaatcttctctgtatcattccagtttgtgctgctgaagcaagcactcaaaatttttttatcctaaaatttttaatttttgagattataattacatttacccctccaaaccttcccacatacccctcccatctctttcaaattcataacctctttttccttggttttgtgtgtgtgtgttcctaaatacataaatacctgctcagtctttacaatgttacttgtatgtatatggttttaagactgctcatttgctattgggtaactagttggcgtgctcttccctggggaaggcagttacccctgctctcagcagtcctcagttgcctgccattctttgtcccctcacacaccccccctccatgttagcatgcctattgttgtccccttgttcagggcatgcttaggtagccatgttggtaagacttcattttaggtgtgtgtgtgttacctgcatgtatgtttgtgtaccacatgcatgcctagtgcccaaagaagcagagtgcaaatgttctttatggttgagccacctctcaagctcctaaatgagtattttcaaatcccccacctagaaacaaccacaatgaatactttggggtagagctgtgcattacttttgaatacttagtaagccaagatatctatatatagtcttccctgcattaagttgtgaggggtagggcatagagtccaggctcttgaacttgctaggcatacactgtatatcacttgctacattcttagtcctttttgcctgctctgtaaacgtagccacatgttatggctgcttacccaggacagtgtctgtattgtagatgtagtttttcttacggtgatattgactagaacctgccagctgttcagctgcatttcttagtgtggtttaatctgtacagcagatagcatttagaaacttggggaaatagaagatttccttggcactctcacatttcagctgtcttatctgggctgtagagagagttgtgtatcagaccattgaaaattgagctttctggcaaggacctttgcaaatgttctgtcatttccattgagagccccaggcagcaagtgtgttgatggccaagtagacatttggttatgaaaatcacagaacttgacctgttttgatcacagaagaagggcaagcttgcttgttcagcaatgttgccttcagtttgaaattatggatatcgttccccttttcctcctcccacagaattgagttatgttccaaaatgaattcactttgtggaaccctaattgagaagatcacaatttcttaagattggagggtttacaaagaattcataatgagaagattttcctcaaaccacccttcaattagaatagaaaagacaacaagaggcttgccctaggttacctaaaaaggactggataataattgggtggggttaccaaaaaaacgcagaggagcttttaaggaaggtttgaggttagattgtctgttttaaaattaattgctttctcttcttagacaaattacagcatttcaagtcacagttgggacattaattgcatctgcgacagctgtgttagcagagctttcttcctgcttctgcctggggcactggcagaaatgaatcctgatcttcaggcagataggaagagcctagtgttttgagtaaaaatacttaaaatttaaactctttttagaattctacccaaaaacagtgtctgaaattgagagttaaacaaaattcaaatacagtacatggcttgagggttaggtttttaggcagaaatgtgtgagactttccttccacacatccatcgctacagtgcacacacttcctgtctcttacttcttctttccctacctaatttgcaagcctctgccttctctaatagtaagtcggactgaggcagcggtgtactggagtcagggctcgctcaccctagcagtgcacttccagagcccgtgcactgcagaacgatctgtaataggttgtttctttgaagacaggaattgccttagctgctccttctcccaccagcatcctcttgattcagtatttttgtgattttggggttggttgctgtagtgttacatagaacttgctctgtttttgtaatcacacgttagtgtagaaacataatgacttctttatatcgataggcaataagttgttcattcttacctttaaaatcccctcctaaggtggtagacattatttagctttaacttacgtttcagaagcaccacaagttgtagtatatttcaactcatggagcctctgactttccctctgaacaattttttttttttagtgctttgagtaacttggttttcttcatgtagaaattgtagaaagtatggctgcactggtggacagttctgtgaagctcatctggaagtgatttctgtcccttggcaaacataacacacagcatctgtaaagtcacctgctgtataagaggggacagttctcattccacgtgttcattgacctctgttgtgtgccaagaattgagattatttacattttcaaagaattattgtgactaaaagaaaacaagaaagcccaaacattactggacagcagaattagggctccttggcttaaaagggtggggtacactggcttcctgtggttagaggaatgttgggaagtgttttctcctgcagtcatgaccacatcagaaagttagttacctagaagttgtcataattctgtatgttgtagctgtttgccaaaggatttgtccctttacagtagagttggtttctccttacattaacagttcacctctcttttatttactttacctttttgctctatttttctttttgaaagagagtctcaccatgttgcctacccaagctgatctcaaactcatggtctcaggttgttctgttgtacctctgccttctgtgtaactgggactatagctctgtgctaccatgcacacacacacactcacacactcacatatatctcacagatttatgtgcatatgtgagtctctccatatatatatgtgtgtatatgtacatgaatatatgcatgcatgcatcatatgtgctggtgttctcagagactggaagaagattccttgaaactggagttataagcagtagtaagctgccttatgtgggtgttgggtccccaaccctcatcctctgcaagatagcaaatgtgtttaactacagagccatttctccagctcgctttttttttttttttaatttaaaagagcacatcatttgttgaaatgatgtacagtacctggtatagaatctaatgtgataagagttttctgtgtcatttgtttcatggctctttcctaaagagccgcctggcacagagtccacaaatctgtttaaactagtccacaggcgttgggagaacattaattgcagcgctgtccgaccctttctaagatgtacttctccagactctgacgctttgaaataggtgtggtttctagttgttgattggctaacagttggcagtatttgctgttggtaaataaaacactgacacacttcatatttaatactttatgctatgagaaaataggatatattcaatccttggactttctgagaggaatctgatagaatgttttatgcagttgtgaacaggcaatttggttatttttattccttatattttggttaggaagataaatgaaaagtagttttgtttttgaagtatctcatttaaagttattaacaataactttagaacttcagtttcacaagatggaaactgtagcgttgatggtggcaacagccatgtggcactgagtgctgagcaccgtgacttgctttagaggcggtttggagggtagatcctgtgttaggtttggctacagttaagtttggttggaagatcagtgtgtgacacttccatgtctcctgtactgtaggagagaatgaagttatgtctgccatgcctccagctcctccaattccagtctccctacttttgtacttcaggattaccctaagtagcccagttgacccagcctcagtctcctgagcactgagattacatacctgtacactatacctggcttagaatacatttaaagatatttttctcctagacctctccataaaagatttttgtagatttagctggcccaagttatcttttcactgtagaaataaagttgtcctggttaagtaaattaaaatgtgtgaatgactgtcacttggaacctgtgtgtatggggcagtgtatggtgcatgggtaggggacagacagagacagtaagactgggaattgaccctctggccttgcactctaccattagcctgtatctacaattcatgactttattttcttctccctgcccacattctgcagggtctcactatgtagccttgactgacctagtgctcaaagatccatctgcttctgcttccgtagtactgggattaaaggtgtgcaccaccatgttgggtcttgattttcttaatattaaatttaatacaaattgagcatcactaatgtgggaattaaaggtttattatatgtaagtacacactgtagctgtcttcagacacaccagaagagggcatcagatctcattacagatggttgtgagccaccatgtcgttgctgggatttgaactcaggatcttcagaagagcaatctgtgctcttaaccgctgagccacctctctaaccccctaatgtgggaattaaagtgctctgaaataggagactttttgagtgcagtgttcagttctaccagtgacagacaggttcagagcatttggattttggattggggtacttgactggcatatccatatttttttaaaaatatatatccacattttttaaaatgtaaaagtacttaaaggatattcagcctgtattttatttgttgtcatttttatattggaagtaatccatataaatgaatgattgtagctaaattacttaagttcttagcagtagcctgaagcaaaggaaaggacattatgatgaccttaaattagttgttctcagctggatacgttgtttccatttagttggtcactgatctttcactggctgggaatttcggagtgtgcatgccttttctcctgctgtggtcacttggtgcctcccatggcatagcatagaagacgactctgcttggctctgactctagttctgctgcatttttctgtctctccagtagcactctgccgtgctctgcaccctgctttgactgtagcgtcctgggcactcaccctgccttagggcagcatccttgttcagggcctcctttgcctgtgtgctccttctgagagcatccacacgtggccatcccgacaatgtctgtctgacagctcatgactcccagctgtgttttggttcaccattgcgtccctcttgcttggcgcaagaggaactttgcaacaagctttgttgactagaaaatttgattccgtcatttatttcttttttacattttatttactttgtgggagtgtgtgggcgtgtgcatgcagatgcagaagtacttggaggacagttctcgctttcaaccacgtggcctctggggaccaaactcagtttggtgatgaggcttggcagtttgtttctttacctgcgtagccatcttacagagctgagggcttgtcagtaggagttgatgaaatccaaaagttggctacctagatcttgctgagtcagtttggtttccagctgtaagtagaacttaacaataccttaccctcccttcacttggggttcttatgaaaatgaatctggagtcagtggagtctccattaaaggaggcaagcagaccaaatttaagcagtcacataatgattcaaaataagcagatacatgcatttctgaaaataattgtcctctaatctgtatttattttaattacagaacatggtccaagacaattcccgggaaggtggagttcttctctagcgagggttcagatacatctatacccattccagtagtgcccctgcggggtgtggatgactcctacccaccccagaagaagtctttcatgatgctcaagtacatgcacgatcactacctggacaagtacgagtggtttatgagggcagacgatgacgtttacatcaagggagatcgtctggagagtttcctgaggagtttgaatagcagcgagcccctcttcctcgggcagacaggattgggcaccacagaagaaatggggaagctggcccttgagcctggagagaacttctgcatgggcgggcctggtgtgattctgagccgggaagtgcttcggagaatggcaccacacattggcaagtgtctccgggaaatgtacaccacccatgaggatgtagaggtggggagatgtgtccggagattcgcaggcgtgcagtgtgtctggtcttatgaggtaagagcagaattctttatgtgggaaaaactgtcaattttgccttttgagctctgagttaatcataggaaactagcaataccagcctcttcagggttagcactggtataagttattggtacatgttttagccttagtttttaatttttagaattctcattacccagattccccctggccttttagactcctgggcctttagagtatgcctctggacttctgatgtcttttaaaataaatgacggcacttggggcttgaaggaaacgtagggtttactgatggtcactgcgacctttttccatgaaacccagaatcatctgatttctgttgattccaggaccttctgcaggagcataggctgctcccttgttttccagctcccaaaggctcccactttcgtctggtcaagatgacctacacagatcagaaacttacgtgttttgaacttataaaatggtcagcgatgagaaaaagccagggttgcagcacctagaggtacagcgtgtgctatggcgtgtgcttagcatccccagggcatctctagcaccaaagagaaacgattgtgagaaaccttgacttttgacttgtaagtttatgatatagttgtccctttcacactaggtagcaggcaggtctgagtgaacacatgaaagctttaaggaagtctgcttgcaggtatttgctctttaataagagagcatgagttcattttgggcttttctgttctattggcacatgtatgcctcttgcctgtaatttcaggatcaaataatggtagcatgaaatggattgttgtgtttagtttagtcagctatttgtggttgtgaagagcagaggaactgctaggccctttgcccaaagcaagagcttgccctcctgcgtgagcccttggctctgtcttaaaggaagaaacatgctcttgcccttgcttgcctgccctgaactacagcttgcttttaaatatcttacaattactttgttttttctgcttaaatttttagggaaacagcagttttaagtgtacaggagtgggtcttcatgcaatttgtttttaaattggtcagtgttttattttccttttacaatctaataactacttgatgactgcacatggggtaagtctgctcggtagttcagagagctcccagcggtcatgttttcttgacagtcttcggtagtgaggtagtgagtggaatgacctgtatgacgtcactgttaaaccagcaaggctgcagttatgaaccccatccttcttaggatggttggtaacttggacagactttccccaaatcaccttgcctccttgtgtgacaaggcccaactcgctcacgttcacttcagtaactgggcctttggtgatcacacccagtgttgtatataatggggatgatggattctttttcacactgagaataggcaggcaaaaggtagctttcagctcagggtgtgtgacatgggctcttttgaaacatagacccattggcctaatgaacgtttcatatttaggtggttttcttgtcaaaccatcaccaacaaagcattcttttccgtgccttctgttttctttttcctgttcaaataatttccagtacttctgtttctccttgggcatgaactttgggtagagggacctcccattttcccaccttttcttttcgtttctgcttaatcatgttggaaaggacttttgctctctactacccctctctgtccagcagataggcagggacgctccctgtggggtcttctcaccatccttctgcttggtgtttctctttttatgcatcttaatagtctttttcatttgtattttctcagtatggtgtttatgatagagttcagccttcaggccagtcttctttgaacactcatgggcctcccaaccttctttctttctcatggtagtccaaacagtatccatatcgtttgcggtgcaattcaatatattcattttgtggcatgatgacagctgctgagcggccatccgtgaccgcccgggttccaaaaacctcttaatttctggtgttagtggtccacgagcctgcttcattcccttcatgtaatttttaaattttaagttaacaaaggtacattttaaattctaagtatgatctgagggagtcttttaatctccatgagccttgctgtctctgcctgcctccattatctggtggttgttcactatgccaggggagatctcttttctcattaaattttgcagtgaagaaagctgtctaagttattgttctatttttgtgaagagataacatgaccaagcagtttataaagaaagcatttaatggggctcttgatgacagtttcagagggtgaatccatggacaaaaggctgggagcacacagtcatggttctggagcagcagctgagagcatcctgcacaggcaatgtgcagacagagaaaaactgggcctgtcgtgagcttttgaagcctcatagctgacccccaatgccatttctcctccaacaaggccacattttccagtctttcccaaatagttccattaactagcagccaagcaatcaaacttggcctataggggagccatggttctttaaaccagcacaaaagccatttgaggatttcatgctgtgttaagtagactacagccagcagtgtctctgcatttccccatccttaattaaatgttatgaccataacattcttctctgtgtgaaaatacgtaacgctttgtatgtgttggaatgctttgtctaagactggcctaaaagtgctgctccttctgcccccacagtgcaggcgttacatgtgtaaaccaccatgcccaacacttttatgtgtgggtagaggtcagggtctcactctgtggtgtatgctggcctggaactctcagaatgcaggcattgactaccattcccacacagctcagggcttttcttgagaattaaaaaaataattgtgtcttgatgtagtcatcaatatcttataggtgctactgaatagagtcagtatcttgaggtagatagagcaagaactttgatttagggagagtgccaaattgtaggtgtagagtggggtctacagctctaggacgtgagagactgaggggtgatttcttatccatcaggaagtaatctgatgtggtcagaatacctgtgactgatattgtgggcactcagacgtttgtaaatactcttattggttcagatgacttgataaacaagcacctctctgtggtgttttcccctctgcctcgggagcctaacagcagccacaggcggctctccccaggaatgtagggcaggcaggcaggaatgtccctactgctttgcagttctttaaatgccttatggtgacactgattttcctagattttcctggctggcccttccttgcttgtgccagaggttcctcccttctgtgagttgcctgtttgtagttttggcccatgtttcagatgttggtcttaagagttttgttcaagtgctttgttctcaacacagtatcttctggactgtgtgctttgcctttttgccttcactgaattatagaatttttaaaaattgaccagttgtgagtctaactctagcataacctttctttgatggattgtgctttttatttatttatttttattaatgtgagtgggtgtttaccttcatttatggctgtgtgttcataatgtgtgtggacatagtgtgtatgtccattgcccatggaggccagagaggagggctgggtcccctagaaaaggagctgccatctgggtgcaggaactgaacctgtgtcatctggaagagcaagcagtcaaagctcttagtgacttcttagtattttaagaaattgttccttctttgggtcacacagattttatcctgcatttttctgcttgtttgaaaaatttcccttcttcattcgtattttaagaaatacatacaagggccatttaccattggatcagcctgcctgatacctgcacccatcccccatcgctaagaaattccatgttctacagtcaggcaggattaatccttaaacttcctgtaagataattatgttaagctttgagtcttggaagatatttattttgctctattataagcctagccagaggagtaattttttaaaaacttgccttgaagtagaaataattcctcaggtaatagctgtgtaattaaaatgactcatgaggaatagttgtcaaagccaaaactcagatttatttctaagcttattttttgattattgctgggacttattaataaatgcctttaagcacatgtttttaaatgattttagtttcacagaagcttaaattctggttagaactggtgcctttcatgtagagtaaaaactgttacctcaaattactcaagggtttgtgagacatggtgttgaagcattggaaaagtgattttgtgtgtgtttggtttttttgtttgtttgattttttttgtttttcatgtaaccctagctgttctggagctgtatataccaggctggccttgaactcagagactctgaggtctatctcccaagtgctatgactaaaggcatgtgccaccagtgccagtcagctgcccccctttaaacttttcattgaatctttgtgaatcagtttgcaccgacccatctccctgtccctttgtatcttctctccacccttgcaagctccccccccaaaaaaaaaacccctgaaaacatctctccatgtaagctgtattgtgttactgtgtgtcacacagtatactcttttgcctaaacatctttccttgcagatgtccattgcagtgagtcattggtctggtatgctgctacactatcaatactgggtctttactgggacttctctcagatatcctgtggttgctctgtgctgtggagatcctgtaactttggatctgcaagacctccccttcacgtgtttcagcagtttctagatgggtacatgttagggtgagccaactccaagccctggatcagggacctacctagatggtagctgagtaagtcagccccaccagctttcctgcatccacactaccagggcaagctctccagtactgccctgactagacctgcaaatgcaggttcccatagatgccagcagagggtattggatccaccaagaactggggttataggcagttgtgagccactcagtgtaggtacaaggaactgaagtccaatcctctacaagaccagtaaatgcttagtccacttttagtcttggagtgcagttctgaagaaaatccatgcctctgtctcacctcttaaaggacttctaggctgatcattttgactgtggtcatagacaaggctagagtagatctggaaaatgagttggatatagggtaagttccaagaccatatagcccactgtttgtatagtttttctgtttctcttgtacagcgttctctggattacttcgtttagttaagattcagagtcctgaaaatgctgcttctaggcattctcaccagtgctctttgaacttttatggaggacatggttttgatttgtttactcttctgtttcattgataccatctaagatcatccttttattggatgcccagtttatagcttaaagtatcttctcacttagatacgttattctgaatatctctttatactttaagaagtcaaacaaattggaaaaacttattacatgttcattacaaaaataaaatttgtacctctttcattagcagcacatacttctggtgacactggtactgaaaacatccctgttattatttatatcatagaaataaagaaagcatagccccttgtagtggttggcatgagaatggccttaataggctcacatttaattacttgttccctctccagttacagaactgtttgggaaggattggggtgtggccttttgaaggaggtgtgtcactggggacaggtttggagatttcaagactctctgccttgaaggaacttgaagatcaagatgtaatctccctgctattccttctgccatgtctttgctctgccatcatgggctctagccctctgaaactgtaaaatgcttcttttagaagttgccttggttgtgaggtttcatcacagcagtagaaaagtaaactaagacaaccctactctctcatactctagaagaaataggctggagtataaacaaacagagagcaaggtgtgtggtcttaagacagcaaaatgattagcatgagaagtggtggatggagaggcgggggtggcacagaggttgagacatggcaaggttgggctggtgaggactttggtcacaaataggcctggacttgaatcacagtgcttctcattttagctgtgtggtctcatgcagcaagttacctaacttctggaacctgaatttatttactcttttttttttttttctcagaatgaaacaaggggagaaattgccgacagagtggggtggtttcaagggttgtgatgatgtgtgttaccataactagagcaggataagagctactcctgtgaggtgagaggctggtgagggtatccttgagtattgcaaaacagccattcagaactcattcctgggaactcgccgtgtgtagatgttgacttttataaacaggtatttaactgtaattggtgaaacaacattgaattagaatcccttttttggacttgcacttagatctgatagttgctttggatctgcagtttgttgtgcaggtaaatcttcaatagtatctctgacatatgtgtaggtggattatgttgttgagaaaggcagactggcacatgtctacagtttgtgagtctgataggcctgtgctgaaggtattctagagtttatttcttagtcacttttttattatcggaaggttgtcattttacctattaagcttgttatgtatagttgacacagaaggtttctttagcacactgacaggaggtaggatagacatgttctctttattttaatcttgaaatacagtatttcctgtgtagttaaaaaattgagatagcagatgttatcaccctaatttgtccagcaggatatatcacctacattttaatatataagtattcaaagtggagtgtaaagtcattttgaaataatagggataaggagagtcctgaattctaagaacttcttatcaacatcagaatgagctgtttatacagaaaagatcttcaatgtccacttgacagattggcagtagccaggacagaacactgtgatgtgcacaggagagcaagggagagcccagcagcagctagaggagcaatatgaattagagatgcagtataaaaggctttggcagcctgagtctctgttttctctaaagataattagagttctagaacattctaatagtagtatatgtagtgttaagcaagcacttttttttcttttttcaattttttattattttcttcatttacattttaaatgctatcccgaaagtcccctgtaccttccctgccgccctgttcccctacccactcactcccacttcttggtcctggcgttcccctgtactgggacatataaagtttgcaagaccaaggagcctctcttcccagtgatggccaactaggctatcttctgctacatatgcagttagagacacgagctctgggggtactggttagttcatattgttgttccacctatagggttgcagaccccttcagctccttgggtactttctctagctcctccattgggggccctgtgttccatcctattgatgactgtgagcatccacttctgtatttgccaggcactggcatagcctcacaagagacagctatatcagggtcctttcagcaaaatcttgctgacatatgcaatagtgtctgtgtttggtagctgattatgggatggatccctgggtagggcagtctctggatggtccatccttttgtctcagctccaaactttgtctctataactccttccatgggtattttgttccctattctaaggaggaatgaagtatccacactttggccttccttcttcttgattttcttgtgttttacaaattgtatcttgggtattctaagtttctgggctaatatccacttatcagtgagtgcatatcaagtgaattcttttgtgattgggttacctcactcaggatgatatcctccagatccatccatttgcctaagaatttcataaattcattgtttttaatagctgagtagtactccattgtataaatgtaaatgtaccacattttctgtatccatttttttgataaaggttatttccagcttctggctattataaataaggctactatgaacatagtggagcatgtgtccttattactagttggaacatcttctgggtatatgcccaggagaggtattgctggatcttctggtagtacaatgtccaattttctgaggaaccgccagacctatttccagagtggttgtacaagctaagcaagcatatttttaggttgcttcaaagtaactatgatatcttcccaattttaagaggcaacaataaattaaagtttgtagttctgatatttaatcatctttattggtacttaatctggtgtctttagcacagcaaatgaggaaacaaaggcaagaatgaacttgacagtgaacggtggcaaaggcagtgctgacgggattagggaaatcgggtaaaattgcttaaggtttagaagagtgttgtaagttggtatgtctcaaccttgtgcaacaggaatgtttgtttaatcagaatgttgtatatgtatatatgtatatatataatcagaatgctacatatgtgtatatatataatcagaatgttgtctatgtatatatgtatatatataatcagaatgctgtatgtgtatatatgtatatataatcagaatgttgtctatgtatatatgtatatatgtatatatataatcagaatgctgtatatgtatatataatcagaatgctgtatatgtatatatatttcaagtactggggttgtatgtagatctcataccaggcaggattttatcaaaagtggactttacgtgagatttgcttgaataacttgaaaggagcaggtgccactccaaacctagacatggtatctcagtgggtggaaattccctgtctactgtatagtacagccttctctgacaattctttacccactaaactttcaggagttgtcattcatttagattcagagaacgtttcttaggaggtagtggtgttccggaaccatgtagaacttagcactgttagtctacctttccacttgtcctgggtagcagaaagagagattgcctttggtttttccagtgagtagagactgtatttggggtgggggaagccagactgggtgccaaatgctccctctgggctgtgctttataaggttaatactatttacatacctttcttctctgagtcatgttaacactcaggaattatatgaccaaatacaaatgagtgggattgaaggacagcactgtcactgtgagtgacagtgtgaacagcagtctcgggagatgacaaacacaaaggtttgacaggattggttttctttcttggttccactagccaggctggccataaattcccagttccacctctgctttctgagggctgctcttgcaggcacggatcaccacaaagtaaaaactaagtgtttactcagtgtagctaggaatctctccgtttttcagactagctgctaagtaatttaaagcttgtttatggactggttccatgtttcagcagttacaaagtgaaacttactgtgagtcagcatccaccagtagggtctcagggggtaacatgtttgttaaattctctccaatgggatggagcgtgaggaagacatctcaccttcctatgttaaatctctaactccacaccaggcaagactaaactagagtctaaggtacagaaattcctcagtgtttcttcctgtgtcaaggtcttgagacatgaagacttcactcaatgtgggcctctgggttggaagagaaaggggcatggaagagcaagcttggtgggttgtggcagagtcaactgctcaaggactagttgtttacaaatgttaatttcctcattttagctcctgtgtcatagttaagtaggaggaaacagggcaggaggtgctagtctcagcatttacagttctgttattggaaatggtttcagaacattttgtattacgtttcggtgtctgcctgcctatgtgtgccagctatggtgtctgtagaggtcagaggataatccgtgaacttggctctctccttctaccatgtatcccagatactgaacccaggcagtcagacttggtggcaagtggctaatttactgaaccatctcaccagtccctctaaaattattgcaaattttaaaaaaggtagagccaggagtgttggagtttaaggtcatccttagctacatagtaagtttgaggacagcctagactgctacatgaatctgactgcaaaagtggggtgggggcagttagaacacagagccttccaacagaaaatgaagggcttttgttgtggttgttgtgtcctgtagactgttctgtgctctgggaaactgggcaaagcaatacagagctggattctctgagtggatattatacaggatgtgaattgtagcttactgacttctaggaacttgaagacagaagaggtctttgttctagaggctgcagacttctagctccataaagagcttatcattgagcaagattataatgtgccatgtcatgactgtaaaaaaatgtgtaatgggaccattacagccaacccttttcctgggtagcaagattctttcagcattcacagagcaattaaatgctaatcccctgctgacaccaggattcagggaaggcaaccctgctggactctactacctaggggtaaagtaatctgtgcagatttatttctttgatgctggacatttatttcctaagccaaaaacaaaaaataaacaaaacccccaaaacacaagaattggaggttgaggacttagctcagtgatagagcacttaccagacaagcataaggtcccgtgttccctctctagatgaaggcttagttttacttataccgatgcaattgaaagcagtagaaggcttgttggtagatatttataatgggtattttaataattcaggtttctgcttgctcaattagagtacagtgcctatggaaatgagcatatctaggtaatacaaatatgcttagctttttaaatgatgcaaaaacagtgtgcctgtctgccctgaacatggagactgtggcggtacagccttgcagttcttgtctgtcaacttctctgtgtaaaagctagaaagcaagagactcagaagaagcagacatgaggtggcataagagggaggcttacaagacctgcaggaagtttttggagatgcagtgcatgggaggagtcccttgtttttaaaaaaataaacaagactatatgactaagtcatgattatagtggctcatatctacctgtacctgcagatcagggaatagaatgccctttcctgacctccacgggcaccaggcttgagtgtggtgcacaaacatataaaaggaaacacctacacacataaaatgaaataaacaaacatgtaaaatgattatacttgaacatcaaatttcagatgagttaggcatggtgacatacacctatgctagctactaagaggcaggacaatcacaagttcaagatgagccaggtaaaacactaaggtcctgtctttgggaggggcattctaagtaaaaccacacagctctgtgctaatctccagctgtctgtgccctagttgccctcaggcctggcaagattgcactctagtgcaatcatcacactaggcgtcagcatcgtacgtgtccaccatatccagggatccattcccttaaaaaaagatgcaagtaccctgcaggtaccctggcattgagtgtgcagcactgccagtctcaaaccagcgaatgtaaacccaagactctgcctttgggatgtaccagatgtgcccagataggctacggcttgctgaccaacagattgctgaagtcacttggtgacagtggcaggggatcaataggactttttccccctttctttcttttgttggtaattgtatttatttacatttcaaatgttatctacgccccggtttcccctccacaaacccccaatcgctgagggtgccccccaacctccccaaccagcaaagcagaagtcactgtgacattgcagaagcaacaaaaatgaaattggttcagttaagcctttgtagtaaagcttttatttctttcaattttaagttacatttatctagttagttattgtatgtatgtgtgcatgctacaatatacatgtagacatgaggacaactaccaggagttggttctctccactatattagtcccagggatcaaactagtatcattagccttggcagcaaggacattatccactgggccatctcactgatgttagcagagaagtcacattgcactgttctactctttataatgatcatgttctttcctatgtacttcaaatctttctcattgtaactgcccagtattcatttggcagtcatcaataaagttatgttgccaagagttttagatgaaggggtaattttaatcttccatcttttgtttggcttttagaatgctcagatttaagctaatgtttagtgatgagaccttgtgggcctctgtcagtcagcagtctcttgtgatgggcttccagagttggtggcagcatgaaaacacacgggctgtttggcctccagcccagcttctcagctcgttctccgcatcctggagcagctgcttcaagagttgtgatgctcacgtctatgagggctctgtgagggtccctgcctcctccttgatccttgttgcaggagctcaccagttattgcagtaactcagagaggggacactgttccaatgtcacagcagagtttgtttgacatttagtgttaatcatagaaaagtctgtcaataaaaacctagtctgtctttttcatgctgatattatcgtccttttctgtaatttttaggagaaatccattgaatatcattttgactttacagtatgtgtagtcagttgaatagcatccacccagagatagccagtcttagtaaatgtcacctcatttgaaaagttggttttgcagattcctttattaaactgaggaacttgaggtgaggacacagccctggattgtccgggtgggcactacacaagagaaacctgagctacacaaacaggaaggccgtgtgagaacagcacctgtgggaatggtgcagccatcagaagccggtacaagccagtaggcccctggagagagcatggccccaccacatatctctgagtgccacctttcttgcactcagaaaggtgggagaatcttcccccgacccatatctctctgcctctgtgtctctgagagtctgtgtacaagtgttcctgtgtgtgatatactcgcatgttgatgcctgaaagccagaggttgactttggggcttcttcagttgttctctacctttgtttgtttgtttgtttgtttgttgtttttgacagggcctcactgaattctgagctcttgaatttatatagacaaactgacctgcaagccacagatatttagctgcctgtctcccactccttcccctaagcactggggttacagaagcacactcaaacaacttgctttttatgtggggcctggggacccaggctcaggtcctcatgcttgctcagcaactattttactcattgaatcatctccccagctcggtatttctgttttgtttttaagccagcaagtctgtggtgatgtgtgaaagcagtcttttaatgacaggctctctctatgtagctttgtctggcttgcaatcactttgtggaccaggctagcctcgaactcagagagatccacctgtctcaccctcccaagtactaggattaagggcacgcaccatcacaggctggctgttatggcagtcttaagatgcagaagtggtatattacccaaaagagaagccttcaggaatgcaagaacagagaggctccatcacccatcatggagctatgggccaagggctgctcttgctaaggtcaccatctctaataacaggacctcacaagtgtgttgtgtgaagtgcccgacacagtgagcactgcccttcttcctgcctggtttgtctaatgcagaggatattacagtatagtccccagaccagcaggttcagcatcatcttgtatcagggtctccccatgccctgtattgaaaaccagagccactgtatcctcagaggtaagcatgtatcagagtcatttagggcttttttgggtttgtttgtttgtttgttttgagacagatttcctaaatagcccaagctggcctcaaccccacaagactctggttgcctcagtcttccaagggctggcatcacaaagttgtgccactatgacatggtgtggagaggggtcttccctctcctggccttggcatagagcccaggatccacctgtagtgtgtgtaccgtctgttttctcatgcgtctcatttggttcctcttgcttgtcaaagtgtcttaggcttccttgtttttgatgaccttgacagtcaactattgagtaacatttcctcatccgggacttttctgatggtttcctcatagactgggattagcagtgtttgaggagaccagagagacagaaagctgttttcctcacctgccagctccattgtcaccattaactctgacttggctttgtgctgtggcaggcctctttattacaaagtcacctcactcctgatttctcccaagcccttggaaaaagggagtcactgtatcctgaaaagcagggcttattatccagcctctttgaggctgagatactgacatattttagaactctgtggaatggtgtgttttgtcttgtgtttttgacagggactcttgttttgtagcttgggctgacctggaattcactgtctagcccaggctgtcctgagctgcatggtaattcttgtgccttggcctcccaagcactgtgtttacagtcatgagccactaggcctagccgacatgcttcagtgcagagcatcactctgttctctccatccaggagtgtgcatgtatatcatggtactactgtactttccactgaaataaattgctgtcattttgcctttgagagtttttccagttgagcatgttttgcctttctcactttcaggcactagaagatgctcttgcctctttccaacactttttatcctgtttagaatcttcagtgtctcagggagcccaggctccttctgttgggtgacacagttagaatgtaagagcttgtattagggagcctaggccccctcagatgctagagtgaggatgtgtgtgaatgctaagccatgtgtacatgcatagctgtaaacatttctatctgtgaccatctgggtttacattgaggaaagcataagtcaatactgttgtcccaagctctaatctctactccatagatgattgtagcttaattgccaccttcccaccccagcggaagcctgctttttccacctgacatcatctactagtattctgattagtggtttggaattgttgcctgaatccccatgagaaacagctgcaccccgtggagcacagtgctcgcatagctccacttgccttgagtgtaaagtctgctcattacagagctgcgatggccagcagccatctcctcagtgctgggaatagaggccaggctaagagttgtgcaattttttcttttaaatattatttctgtttaattcaggctggactgttttttaatctgatatcatgtttcttgctgttggtaatttagacgcgtggcacttcccacttttgtgtcttaataatactaattgtggacaggtttatgcctgagtataatgaggatacagaaaattattcaactgatgtgttttgaagttttgtttaatccccctggccccattctttttatagtggttcatgtgcctaagggcatgtggaattttaatagaatacaacattaatggatgtgtaaaataattaaagacaagtctaaacagcttagatgatagtactccatgctttatacttagatgtttgttagcaagctgaagagggtttggaatagtatgtgaattgttcgttcatttgttgcttagaggatcattattaaatgccttcttgtgataggggcactgttagccagaatgctggactgagtagatgtatatattcttgctattaagaaatttatcaaagacagataatttctgtgattcatacactcacagaaatatatagctttcaaaaggttgtttgtttcttttaggaacatgcacttattttgaaaaatcagcagtcagtaattcttctatctgctctgactacacctcggggcagggtgaacaacagacagggtatctgcttgtgtctgttatgctccaggaagacaaaagagcaggacccatgagcatgtgagtggcacttctcccaggctgcagagaggcatcagaggctgaggaggacccagcaagctcaggtagcatgggcacttccctgggaagttaagtgaaggttggctaaatggcagtcagttgaatatcagagccttgagtacagcatctgcccacttgatttgatttgttcgtttccctcagcaagtactgcttttatgcctcacctccagacattcccttcatcacaaaagtggtataggaaatacacctttgcagaaaatgggtatttttagaatattttgtgtcataaaatacaatgtgcaagtaaaaaagcattcttgtaatttaggcagccacaggagatcacaggtgagtaagagcttgttccacagagaaaggtgtgcacactcgtgtgtcttaggagtacagatggagttaggagggagcaggatgctgtaggaaaccagagtagggtgggtggggctcatccacgcacacagtgaccgtcacgcagcctcatggagagcacatcaggctatgcatgcagtggtaatcatatatagtgtgaccacgttcaaggtcacgtgcaagggaaaaggaaaagatttcaaaatcaaaaagaggctgggggtgtagttcacttagagagctcggctagcatggaagaagtctccatagcaacacataaccagatacaatggtgaattcctgaaatccagcattctggacctggaggcaggagtggagggaattcaaactcatccttgcctacatagggagtttgagagcagcctgggctgcatgagaccctctatcaagaaacagaccccaggctcagagggcagaagcacttgctgccaaacctgatggtccgagttcagtcttgagacccgaatggtggacgtacagaaccgattcccaaaagttgtctgatttacacacacatgctgcacatacactacataaatgtaattaagacactaaaaatcaaatgacattaagtcagaagcatgaaataatgctataaatctataattcaaaattcactttgaatatcaaattcaaaattagggtttgttctttaagattaagggagatactgtgaccaagacagccaggtgaaagaattatttaattcctatagaattctgtgtgtttaactcttcagtttccttttcatagagccttttaaatataagcatgctcttcctaacattgtaagctcatattgatagtatactaggtagaagacctcataggattttaagctctgtaacttagtctgacttggtatttctcggtattgacacacagcattcagttgccagggtgaacagacacattacagagattgtactcaattgtattttctttaagatggcagatgaaagcatgaaggacttaagtgagagtaacacatatcttaatcattgcctcccactgtaataaagtaagtctctctgattttgttttgcacaggtcctggttagcagttggtcagtatacttcaggcagggttggcagatgggtgaaatgggccatgcccagtgatgtgaggttgatgcatctctagcagatgtgtggtgaagctgaggttggcagttgggaggcaggagggcggtgcacctgatgactgctggcacatttcagtgctggcttcttagtgcctgcattataggtgatgaggcctgatcacatgggctggcacaaaggaaattaaattgctactcctggacttcctatagaaataagatcaagagtaaatatctagaagtagaattactaggttacaggggaggtatgtaattttataagaagtagctgtgtttttctctaaggtacttgtgccaggttaattctctatgtgaagaattctggtatcactttgcctcatattctcaatagtgtttctattccactacttaatggggtgtgtgtgtgtgtgtgtgtgtgtgtgtgtctgggtgggtgtgtgtgtgtgtgtctgtctctgtgtctgtgtgtgtctgtgcgtgtgcatgtgtgtgcacgtttgtacgtacttatgtaagtgccatgacacgtggaaaccaaagaactgtaggagtcagttatctccttataccaaatgggtctaagggatcaaactcgggtggtaccaggcttgacagtgggtgtctttatttgctgagccatctagccagctctgcctttgttctttgagcagtccaggatattctcatctttcatcttcctacctttatcttccaagctctggaactataggcatgtgtcatcacatccagtttagtatatttcataatttgacattttaggtgacaattagtgcctgctgaaattgtcaattatattatccccttcttaaaaatttaatcacatattcttaaagactgtatctgatatgcatcagtctcacatctataccctgcctcagtttccagtcatttggtctttgtgatagttgagtgattgaggcatgcctagcatgagtaaagcacacccgagtccacaggagagggctgactcatgggaagtcactgggggaaaggcctgccttgaatgtgcacagtgccttcccagaggcagctgtcccacaatccttttctctgcttcctgattggccatacgcttttcctcttctcctgaggctcctgttgccatattctgtgtaagaaaccatggattgaagcctctggagccacaaagtaagcaagcagttcttcctggaagttatttgtgtctggtacttgcctacagtttgatgattgatttgtctaataactgacaaataacaaacgtataaaatgggcaagcctttggattccacttctgagagacacttactgagcggcacattccacacttcagatggggatatagctggttcaaagctgcttcacctttctgagattgctctgtagttcatttctgctctgaaactgcagctctctattctcctcctctgtgtctgtgtgggccctccctctagtgagcctcttctctacagaggggctccactctagtgagcctcttctctacagaggggctccactctagtgagcctcttctctacagaggggctccactctagagagcctcttctctacagaggggctccactctagtgagcctcttctctacagaggggctccactctagtgagcctcttctctacagaggggctccactctagagagcctcttctctacagaggagctccactctactgagcctcttctctacagaggagctccactctagtgagcctcttctctacagaggggctccactctagtgagcctcttctctacagaggggctccactctagtgagcctcttctctacagaggggctccactctagagagcctcttctctacagaggagctccactctagtgagcctcttctctacagaggggctccactctagtgagcctcttctctacagaggggctccactctagtgagcctcttctctacagaggggctccactctagagagcctcttctctacagaggagctccactctactgagcctcttctctacagaggagctccactctagtgaggctcttctctacataggggctccactctagtggcctcttctctacagaggggctccattctagtggcctcttctttacagaggagctccactctagtgagcctcttctctacagaggagctccactctagtgagcctcttctctacagaggagctccactctagtgaggctcttctctacagaggggctccactctagtggcctcttctctacagaggagctccactctagtgagcctcttctctacagcggagctccactctagtgagcctcttctctacagaggggctccactctagtggcctcttctctacagaggagctccactctagtgaggctcttctctacagtgggctccactctagtgagcctcttctctacagaggagctccactctagtgagcctcttctctacagaggggctccactctagtggcctcttctctacagaggggctccactctagtgagcctcttctctacagtgggctctactctagtgagcctcttctctacagcggagctccactctagtgaggctcttctctacagaggagctccactctagtgaggctcttctctacagtgggctccactctagtgagcctcttctctacagaggagctccactctagtgaggctcttctctacagtgggctccactctagtgagcctcttctctacagaggggctccactctagtgagcctcttctctacagaggggctccactctagtgagcctcttctctacagtgggctccactctagtgagcctcttctctacagaggggctccactctagtgaggctcttctctacagtgggctctactctagtgagcctcttctctacagaggagctccactctagtgagcctcttctctacagcggagctccactctagtgacctcttctctacagtgggctccactctagtgagcctcttctttacagcggagctccagctctcaccctcagcacgccggtccttgtttctgtatcacaacagggctatagtttttgttgaatcagagaatctagaactgaaggaagtgggacttgaggtggaaagcagtcatactcctatccaccctgacaccgccacatcttcaggttgtctgtgttacttaacattaaggcagggtttctaatcatggatgggtacagtcttaaaaggttggtcctggaggtgaaatagaacccttagttactgtttcctgctgcagaattactttgtatgtaaaatcctgagactatgaggactgtaatgcctcactcacttcctgggtccaagtaatataaaaacatcctcaccaataaaaggtactggctgacctcaaactagtttaaatagtagttagatcttgtaccaaggttaaattggtgttattctagagagttagtactctgtgtgtgtgtgtgtgtgtatgtgtatgtatgtgtgtgtgcacacacactggtttttaatgttgatgctattacacccttttgcccccacaccacacacactaactagtgagtattattgtgtgtgtagcagttggcactagacccttgaagcagtctcagccatggctgtgacctaccctggaaactcaacacaggaagtacacagtcccttaccacttttccctcctctctgtgactcagccatgtcttactcttacatagcgcctcacttgtaccagtnnnnnnnnnnnnnnnnnnnncagatgaaagcatgaaggacttaagtgagagtaacacatatcttaatcattgcctcccattgtaataaagtaagtctctcctgattttgttttgcacaggtccctggttagcagttggtcagtatacttcaggcagggttggcagatgggtgaaatgggccatgcccagtgatgtgaggttgatgcatctctagcagatgtgtggtgaagctgaggttggcagttgggaggcaggaggtgcacctgatgactgctggcacatttcagtgctggcttcttagtgccttcattataggtgatgaggcctgatcacatgggctggcacaaaggaaattaaattgctactcctggacttcctatagaaataagatcaagagtaaatatctagaagtagaattactaggttacaggggaggtatgtaattttatgagaagtagctgtgtttttctctaaggtacttgtgccaggttaattctctatgtgaagaattctggtatcactttgcctcatattctcaatagtgtttctattccactacttaatggggtgagtgtgtgtgtgtctgtctgtctgtctgtctgtgtgtgtctgtgcatgtgcatgtgtgtgcacgtttgtatgtacttatgtaagtgccataacacatgtggaaaccaaagaactgtaggagtcagttatctccttataccaaatgggtctaagggatcaaactcgggtggtaccaggcttgacagtgggtgtctagccagctctgcctttgttctttgagcagtccaggatattctcatctttcatcttcctacctttatcttccaagctctggaacaataggcatgtgtcatcacatccagtttagtatatttcataatttgactttttaggtgacaattagtgcctgctgaaattgtcaattatattatcaccttcttaaaaatttaatcacatattcttaaagactgtatctgatatgcatcagtctcacatctataccctgcctcagtttccagtcatttggtctttgtgatagttgagtgattgaggcatgcctagcattagtaaagcacacctgagtccacaggagaggactgactcatgggaagtcactgggggaaaggcctgccttgaatgtgcacagtgccttcccagaggctggacactctgcagggcagctgtcccacaatccttttctctgcttcctgattggccatacgcttttcctcttctcctgaggctcctgttgccatattctgtataagaaaccatggattgaagcctctggagccacaaagtaagcaagcagttctttctggaagttatttgtgtctggtacttgcctacagtttgatgattgatttgtctaataactgacaaataacaaacgtataaaatgggcaagcctttggatttggttagtgtccccaagtaaggttgtgattccacttctgagagacacttactgtgcggcacattccacacttcagatggggatatagctggttcaaagctgcttcacctttctgagattgctctgtagttcatttctgctctgaaaattcagctgtctattctcctcctctgtgtctgtgtgggccctccctctagtgagcctcttctctacagcggggctccactctagtgagcctcttctctacagcggagctccactctagtgagcctcttctctacagaggagctccactctagtgagcctcttctctacagtgggctccactctagtgagcctcttctctacagaggggctccactctagtgaggctcttctctacagaggagctccactctagtgagcctcttctctacagaggagctccactctagtgagcctcttctctacagaggggctccactctagtgagcctcttctctacagtgggctccactctagtgaggctcttctctacagaggggctccactctagtgagcctcctctctacagtgggctccactctagtgagcctcttctctacagaggagctccactctagtgagcctcttctctacagtgggctccactctagtgagcctcttctctacagaggagctccactctagtgagcctcttctctacagtgggctccactctagtgagcctcttctctacagcggagctccactctagtgaggctcttctctacagaggagctccactctagtgagcctcttctctacagaggagctccactctagtgagcctcttctctacagaggagctccactctagtgagcctcttctctacagaggagctccactctagtgagcctcttctctacagtgggctccactctagtgaggctcttctctacagtgggctccactctagtgagcctcttctctacagcggagctccactctagtgaggctcttctctacagaggagctcccctctagtgaggctcttctttacagcggagctccagctttcaccctcagcacgccggtccttgtttctgtatcacaacagggctatagtttttgttgaatcagagaatctaaaactgaaggaagtgggacttgaggtggaaagcagtcatactcctatccaccctgacactgccacatcttcaggttgtctgtgttacttaacattagggcagggtttctagtcatggatgggtgcagtcttaaaaggttggtcctggaggtaaagtagaacccttagttactgtttcctgctgcagaattactttgtatgtaaaatcctgagactatgaagactgtaatgcctcactcacttcctgggtccaagtaatataaaaatatcctcaccaataaaaggtactggctgacctcaaactagtttaaatagtagtcagatcttgtaccaaggttaaattggtgttattctagagagttagtactctgtgtgtgtgtgtatatgtgtatgtatgtgtgtgtgtacacacactggtttttaatgttgatgctattacacccttttgcccccacaccacacacactaactagtgagtactactgtgtgtgtagcagtcggcactagacccttgaagcagtctcagccatgactgtgacctaccctggaaactcaacacaggaagtacacagtcccttaccactctttcccttttctctgtgactcagccatgtcttactcttacatagcgcctcacttgtaccggttggtttggtttagtaatttctccctatgaaacatcaaatttgtataattcccagtctcagaaacatcagtacttaaccctttttctttaaaatagaaaagacctcatggctcacatgtaggtacttttttttttaaactacttttaaaatctgtaagtcttcattttcttaaaatgaatgaaaatttaaatgccctgagtgttatgtcttttatcatgtcccgtctgaaataggttctcaggctgatttttaggactgacactcttagaagtcacagagcagaggatcagtcagtttgtgtgtatttcctatgagtaggtccacactgtcatgtgggtggaagaactgtagaagtggcactgccttgagctctgtgtgtggttctggccacactctccattacagagttactctgcttaaataaagttaatgtaaaccagtgagcatctttgtggccagctccccagtctctgtaagtaccctgtccacttcaggccttacactcatcagtgctgggcaaaactgtggtgctggctaagtggccctggaccccagccagccctctcctggtattagttgtaagtaaaggtgctcctgtttccatctgttcccctgggttgtacctgtagattcttgggttcctgttgcttaataggttacgcggtcttccttttgctctgtcttcctattgaaatcctggcgcatttgtagtgcttcctggctagctctgtctttaagatggcttttatcattcttgagcagcttcttgctttcttctgtaataagctgttcccaagatatttcttgttccctagtcctacagccgagacccttgttccgtgtacagcagaaaacatacagaaactaaggtgtaggctttaggtatgttcattgtttttgaggtattgctgttcatcgctatgtttagtggactcaaccagagaaaaccgagttcttaacacatttaagtagatctatgattgtctgttggttcatgctgttaccccaaactcatttcaactctaagggatctaattatctctttccatattgggaactccttcctttgccagttgaggacctgtattctaggatgtatttatttacctcatcctgtgtgagaacagtctcctgttgcctccacattaccaccatgctccctaggccctcacttctgtgctggtggctctgatagctgtgctggtggctctgatagctcattccacggccagtcccagtacctacagaagcctttcactggcatctgagacccccgctgggctcttgagcctgtcttctccaacctcggaccccatcttggggttctttacttcagggctaaggctcaggtagatcttgaaagaagcctaaatacgtcttagcattagctgtctgtctggtgctagagatgaagcaagccagggcctcacccataccaagatgcactctaccactgaccccttaaaacaggtttttaattttagctacttggccctagaaaatacctgctacatgtgttaatgtaaccttcagtttaagtgtataaatttcaaaaaacaaagcaaaacaatataatttctgtattgataataattttttgaggattttttaaaaagttagtgcttatgccagacatttgtccttttaaaaaacaaactagattttgatactctttatgattaatatatttggcaattattttttaaaaatatttattttaaaaattaagtgtgttggagaatctgtgcaggtgcccatagatgcgagaagagagtattggaccttttagatcggaagttgcaggtggttgtgagccggatatgggtgctaggaactgaactcagactctctgcaagagcaggaagcgctctaaactgcggagccgtctctccaaccccacagcacctaatgtttgataagcttacatgtacagagactgtgataaaggtgtttgagctttaagaggatgctcctctaacactgaaatgaaacactgtataaaagtgcaagtattgttggcaaccagcctcaacgctgtcgtctggcaacccaaccagtcattaaaatgagctggagttggccgagtggcagaacactcagcgatagctacttctgccctgggggtggggggcatatggaacaactcctccttttttatctagactttgtatccacaaattagctatggaggaaaagccttgtagtcctatgttaagcactaagtagttttctttttctttttgatggtaaatgcagtaatataaaaaaaaattgtcgggaatagaatcttagtgagaaatacgcagatttgtttcagatgtcttctcaggagctttccaatttccatgctgttttctgcttggtgtggtttgctttctctcaagttaaattttgatttggaaccaggtctgcccaatggcctgagtaaatggacatgcccaagctataaatcctacctgaagtttggacgtgggaaggacatgtttacagtgagcaccattcatttacacatacagtgagcaacacacacatacttatgtgtatttataggaggaagtttgggaagacaagacttgtgtccttactggaacactgctttaggctatgcccccaaaccatgaatagttactcattgctctctgctgtaagtagtagttttgtgtgggatgagacccaggaaatagcatgctttctcacagctgatgaaatcagttttctttctgtagccatctcattcttgtgggaccactgcttctacttgggttctagccccatggctcacagtttgcatctttacaaaacatcttcataggaaccaggctcagtagtagccatatccgtgagcagggttggtcattagcatccttgttgctgaatcaaggaatgaggacttggctctggtagttaggaatgtctcaggcatccaccacctggtgtcattggctcaggtccttctttgagtggagcaagtgacttttgacaaacaagagtctggaaattagccacaccgatttgaaaactgttcagtttttccttgcctgtctagtttgacaacgtggaacagggaccatccctgcttgtatgacctcagttccatttctgaaaccaaccctcttatctcagagcctgtaccaggggaagagaaaggatatgaattaggcatgggtttgaaataaaatcttaattatcagtgcaaacattctatgaaggaaggaatatgttactagctattggtatttaaaatagaaaatgataccttcagagaacacaggagatggatcaaccatcttcaaaatggaagtcctactcagagccaagtaagtgtgtgtttgtattaaccctgtgctgctgagagtgtatagaaaccctaggcttgttctgtttgatctcagcaccctccgggtctgagcaccgagcctttcaaaaggagctttaaaaacctggtgggtctgtgttttctctgcttcatctggaagctctgcgcagtctttgcagattgataatagctatgtttgtattgaaggagaaatacatgaagaccaggctcttccttataccactgatggccgtactggctctacttgcatacactaattttttcctcttgatcaccagtgcatgaagtggtcatttggtgactagaaggcacggtaaattattggttataataaattgatgtcatgcccacagaacagcaagcaagagggtgaattagggacagaaatagtaacggtttttgttcaggaaacctcaaagcgcatactaaaatattaccacgttgattccattcttaaaagaataggaggaggaggaaaacagattcaaaagacaaaatgtcagcactgtaagtatagtaaaacagattgtagaccaaacttttactgctttctctttctggaaatctcttcacatagtttaagaacctttaagaagtctggtcattatttgctggctggtaaaaggaggtaagattacatagagctaattgcagtgatgtttccaaatggtagtatgtgtaccttgtgagtgtgtgtctctgtgtctgtctgagtgagtgagcttatatgtaccacgtatatgcgtgagtctggagttacaggcctgtgaactgcccaatatgggtcctgagccttgtgcaagagcagtaagggctcctgacccccaagccacgactctcgctcctgagatggtcactttgaaccactcttttctttgtaaatgtcttaaattttcagtcacttaggtttaacagaaaatggccactctccacccttcacctaagtacctcaaaggcgtactcttagcacgttagcttttgctgcttcttcgtgccttttattttatttgtgcacttcatgtcaatttcagatacagtgcttgggtttgcccttaaatacctcagtgataaaaaaaatagttcagtaacaaaattgggacattaacattgctccattatctcatccacagaccatattcatattttatcagttatcccaatagcatctcacatagcaaacaaacaaacttagtgattttttttaggattagaatctaggattctataaagtgttttgttgatctatctcataaatgtcctaggttttgaccttgtatttgctgtctgacattacattacattaacaattacaggtgaggcaggatgtggtggtgtatgcttctctagagttctagcacttgggggctctcagacagaaacagcacaagttccaggccagcctgggttagccagggtagactttgatttttttttcaaaacttaccttttaaataagtgttcttaaatgctgaaaccacccttctagctcaccacccaccagaagtagtggaaaagacggttattaggatacagagggatgtggacctgtatagaaataattctttggagcaaattcaggatgtattgtcaggatgcattgtcaggatctcagcaattcggctcacaggaatcggcagtggcaacccgatgtacttgcaaacatcatcagttcagttcagtcgtctcacgatagcaagcatgaagtcagcagcagtggcacacccagcagaaacagccaagtctccactgaattggcaggagtcagcaggagtgaccaggagcaacagggatgccggaagttctctgcttgcctctcttgatgaagtgaagattagcaaagacagcaagaccagtgattcacagacctagctgtcaaggcccctgtcactgtccattgagtccagttgatgctccctgcaaacatcacatgtcctcgcacaggccttgccttaccacgtgagtctgtaccagctgacatcactgccaatcgatccaaggcccaagtctgcggaagcatcgagaaaccgccagaacaccaccggaagttttttgctgcatttctttctatgaagtcatgacaaacgatgatcaataaacaatggtaaagcttgatggtactaataccatcaagcactgtctgccatctgttaggccgttcttaatgccatgcatcctttcgcttgtttgctttagcaaaacatcctttcacctgtgtctgcttcagtaaaacaccatctgacacaactggttttccaaagaaaccataagtttccacttcagccagcaagaacttatttctacctgtccctactttcacccccaaaagattctggaagcttatttacagaatgctcctaaatttggatttttgtttccccacattgagtgatattctattctcagaatattacagcacatgactgcagttctgtctgcgtgacagtgttaacggagcacttgccaggtttctccactgtaatgtcacttttcccttttgtgactagtaactcttatgtactttgagaccctgaggtctagtttctcctctcactgtcatggggttctatcatccattgataattattaacttttttggagttagcttgagtgtcttattaacttgttttttttgttgttgttgttttgttttgtttttgtttttttgagacagggtttctctgtgtagccctggctgtcctagaactcactctgtagaccaggctggccttgaacttagaaatctgcctgcctctgccttccaagtgctgggatttaaggcatgcgccaccaccgcccggctgtcttattaacttgtgaaggggtcatgttgaagttgagtagtgtgtcccctgtcctgtgtcagtgcatgtctgtgtgtagcctcagctgtacatcaggtaccccaaagggagaaggcagcatcctgtctgggctggggattggatattggatgcagtctgggtgctggctctgtcactggatgccccccccccttccctatgtcaggggcgtggcttctggagaccagcagattctacttcaaagcagttgggaacagagtcagcctgtgcttattttctcttggttcattcacttcaggagccgttattgaatcttattgtcatattttaaactttttaaccagtgcttgctgaagtttaatgtgtcacacattaggatcagtaccttgttccacggggccagcgatgctgagaggtggaaggaacttggagaagtagaggcttactgggaaatccctgggctgacctccttcccagctttgaggagtactcctgctgttgtccagccctctgccaggaagtgggcagggaggagccctctccagacttgctgtgccttttagactttcaagcttgtgagttaatagtgctttcttaagtgtccagctgaggtacttcctaatagtgataaataagaagggctgagaagaatgctggcagttcttattccagaaacaagtggcactcgagtagtgaaatgaatgtaagaacatggaatctaaaaggctgaatattctaaccataaaaatgatgtgttagaggaaatacatttaacctaattgcaaacattgtaacctgattatattgtacaatgtatatatcaaaacaccatgatatatatatatatatatatatatatatatatacaccatatatatactgttttatatattagtttagaaattaatttaaatgaaaaaaacatggactctagtctatccctttaaagcccaaagatgatggtatgaatttacccaaaaatgatacctttatagctgatgtgtgataggtttttattttgtttttaaagctaccaaaagcaattaatcttactaatttttttccttgcttggcttttaatagtttttcattttattttaaacaatattgaattgtgtggctttttagctagggtcttgctttattaaaagaacctacaaactagatctacctttttaaaattaaaaatccctaaactggagtcctatatcccttccataataatgtgtgctgccagtggtcagcgttgatccgtgtcacggccccaggacagcctcacaccctttactttacagacgttgctacttcctctctccctggcatgctgggcagtggaagcatgccactgatgtcactggcaccctctggggttgcccaggctcatgggatatatactgaatcctttcctggctggctggctctagcccgatgttgctccaaagtctacttgtagtaggacatagaagcaacttcccaaactgcttgggcacagctcaggaaaggggtctggtcacatagtcactttgtgtgtgtgtgtgtgtgtgtgtgtgtgtgtgtgtgtgtgtgtgtgtgtgtgtgtgtgtgtgtgtgtgcgtgtgtgcgtgtgtgtgtgtgtgtgtgtgtgcatgtgtgtgtgtgtgtgtgtgtgtgtgtgtgtgtgtgtctcgttcacctggcttctttatggttacataagctaaagttacagcaggactggaggaagctcctacacccagtgctcccagagcttccaggggacacctatctgcatttcttgctctcagttctgctaccatcctggcatctctgcatcaaatgacttagctcttttgcctgctctgctccacctcctcagtggcctgctggaaaaggagcctcttatgtctgtccatcaagtggatcagattggccaccaaggacactgaggatatacgctagggctacccagcagccttctacccattcttacttacctcttgggggacagagctcaagggttcgctatgctgtctaggctgaccctgaactcccaggctcacctgatcttcttgccttagatagctagttacctgtgtctacaaatgagtaccaccatgcagtttattaccctcttattctactctcaaacatcaccttaatccatggggttgagatgactcttcctgccagagtaccttcacatctacagggctgggagccacagaggaacaggtgactgtttgtctcataccagccttattacttctactttatttgctaggatcacataaggatatgtttgaacaggtatatatgctcagcatcctgccccagacttcactacccttcctctttcattattttctgtatagaactgagtatttgccaggaatttacatggtttggatggattaaattttcctaggcctctgtatcaaaagaatactcaagcagtttcagatggggccaaggcttgggcagagaggacaaaagaagtctctgcatcagagagctgagaaatgaggaggtcagcaccggagccttgtttgtgggctgcagaaggtctttgtaggaaagaccagttgcatttccaaatggttggcactcactatctaggggggaaggtggggcacagggcagtctgctatccttatcagtttccactgtaccagagccgtctcccccaaatccattcttgttcatactcttttttgtcccccaaaactgtaatcacagaagatgttttttatttagcccaaactgagactattctggtgggatacttggacagaaacacagacttgaagaagcagagctgacttcaatgtagtaactacctgttgtaaagagcagaggtactatgaaccctagtaaccttgtttatagccaacaccattgtgtaaagacttcttccttcatcctaatagttataaaaatgaaataaaaataattctggttcaagaaatggcttcatgtaataactaccttttctcttattcttcctagatgatcattagtgcgtgagtatcatgagagcttagaagtaaaatgcttctgatatgccatgaggtatggcttacccatgcatgtattaggtcagaccaagtgctgcgtgacgtgagctgtaatagaaagtgcctttcttgtatcttaatcagaatggtacttctcagctgtgtggcctgtagagttgctgttgcagctgtaatactggctggaagcagggatgtagtgaacatacctggctcttcaaggtctttgagagttctggttttaggactatgcccatttttactttctcgaaagtgccttttattcacaaacccaaaatagaatgaatgtataccacaaagtcaggtccacgcagaaagtgcgtggtgcactgtgtttaattttatagtttcctggttatttgtttatttgtggctgaagctgtgatcaaaacccaatagtcctcctgccgcagcttcctaagtggtggagttatatatagatgtgtcccaccatgcccagcaacttcttgtcttttagttgtaacataatacaacatttgttatgagagctgttagttagctcagtggttactggatcttttcttacaggagattacattttcccctgaaggtgttgtgttagaattagaaaggtaggactggaaggcagagtgtaatatcccagatgaagtgaggtatcttggcatcagtgaggcagaactggaatagcatggtggcttggcaaacagaagccaaggagaagcttggctgcggaagagaaggccgagtgcttagggaggaacaccacatttaggccctcctgtcctctggcaaaggctgcatgtcccaaacgctccagataaagggtcagtagactctgtctctgaagggccagacggtaaatacctcggtgtctgtggacatttgccaactgttccgtgtgcacttgatgttgaaactgagcctatagttacccaccgccagtctctttattgggttcttggttcccagagctccactgcctttccaaaatgggaacaatataaataataggatgcctggggctgacatacagttacagaaacatgtgatatgactttagttgtgcgtttttatgaaatgttattctgaagtgttgcttaagaactaaattattaatatggcattacaaagaaaggggcaaaccaccataactgacatccaagaaatgcagtagaaatagggaaatttctatattgaatacaggctgagtcctccagggattccaggttggcaaggctgtttcccaggatatgggggtgtggtctgggttcttggctctctcctgcaacagtcccttgttagagatggatgccatggttgctgtgctcagactctgacccaggagaggaacagggcctcagggttcagaggtaggagacgtgtcctttctactcacactccactgggggaaaagttggacacgtggtcacgcctaactgaacctgaagtctggcttggaagacagaccagaggtcagtctgtaagtattttaagcagcctgtgcactcttgtacatgggagttttgttccctaggttgcaaaggcagagcgcttgggtgtcacacttatggcagtgtaccaaggtctcaggtccttagtacagttaaacagttaaagttaattggttttcagatttaaaaggtcttaattttggaacagacttctagcatctccattccagcaggttggctgttagaagctgatcatcaatatattctgtgtgtagttctgattttgtgtgttacaatttaacataaatttataatttgatgttctataaatgacataatatccttatatatttgacgtaaatatattttctattccggaaagtcgttgtgactgtaataacagatgtgacaccttgggaatgctctcagactataggctagtacatcagtccagacgggaatgctccttacagggcgtctccctttaaatctctgtgtcgcggtttctgctttcccttgtaacagtttgggaatgcgttggtggtgaagcctgtatttggaagggttggaagtgctttattgttaatcacaccacaccgccctgatctcaaaagaaaggagacatttaaatgggccctgcaggtagatcttgccagcttctttaggaagaatcaacataacaattaggagtatttatataggtactcacttagataaatcagagatggaaataattaaaactttgttccttttcatctcaggaagttgcctgtgggtcactgttagctgctagggttgcatacatgaagtgtgtgtgacgaggacacgtgaagagaagctagggcatgcattcaggcttggatcacagctctcctgcttggtctggttgactgttacacagctcctggttgtgaatcttggtgtagaacactgttactcacttggtggtgtggctctggtcacttattttgtcattaattaaatcttaaagtagtaatattggttatttctaagtaataattctggttagtctggtatttctggagttaatatttgctcagggtttttctggtttctgttggtaaacatgattgactattgcttaaccccatgggtacccccctcatgcactgcacacagacatccaatttttaaagaaatcttttttaaatgaatttttttttaaatctatgaagtatgggaggtcttcccatcttctagtgtcttctttagtttctttctttagtgttttatgtttttcattggagaggtctaacatcgtaggtgtgctttattctaaggtctataaattcttccttttttgaaaaaagcttttccagcttgatggaatataagtttctaaagatgtatcctaatgcttttctgagtttcttcaatatcctttattgggcctgcttttctacctctgatttggttaatacggatcttccctctctgaggttggctaccagtgtactgattctgtttccttgttgttggtggtggttttaattgtttttttttttttttttcatttcattaatttctgttgtaactttgactatttctttccatatgcttacttgagtttggcctgtgtttctttctccaggccttattatatctaccccattttacatgagcgtagcacggtttgatacctgaccatcagtgggacatgaggagatgagtgtgagaaggctcagaaagatgtgacactttccttctgtcttagttagggtttactgctgggaacagacaccgtgaccaggcagtctcacaaaggcaacattgaattggggctgggctgcagtttcagaggcagtgcattgtcgtcatggcgggaagcatggcagcatgcaggctcactcggtgctggagaagccaaggcttttgtgcttttatctgaaggaagccaggaggagatggtctttcacactgggcagagcttgaggctagggtacctccaagccccacctccacagccacagacttcctctaacaaggctgcatctcctcccataaagtcacacctcctaatagtgccacttcccataggccaagcatattcaaaccactacaccttcttcaaatggaagtcattctcacagggttcatgagtaacctatttttaaaagagtatatgcttgctttgtatctgcatctactttttattttacttactcatctctgtctgtctgtctgtccgtctatctttttttgaagcaaggtctctctctatagctcaagctggcctggaattcagtgtgtaacccaagctagcttcgagcacatggctttgacatgcttaagcatgccaactgttgtgattacgggtgcgagccaccgctctcagctctcctttttatagttatacataattgatactgagtaatgcaatcaagatgccatgaaaatggaatcgttctctgtgctgctaccctgcctctcccgttttccgtaagagagatgctctggtcttcggctgatgcatgagttacttctttgccagtaatcttcatgctttctctcttctgtgactttttcactactcttataactccgtcgttttagcgtatctttttattctttttaattttttaattcttttatttttatttttatttttggtttttcaagacagggtttctctgtatagccctggctgtcctggaactcactctgtagaccaggctggcttcaaactcagaaatccgcctgcctctgcctcccgagtgctgggattaaaggcgtgcgccaccacgcccggctgcatatctttttatttatttagccaatactgccctcaaggttagttattgtttgtttagggaagttcaggtggtcagaagtagaatgtcataactaaacactatgatcggtttctgttttaatatcggtaagtacttttattaaacattttaaagatttacttatgtttactttatgtgtattagtacttgcctttgtgtgcaagtcatatcgcacgtgtgaaggtcagaagacaatgtgcaggagtcagttctctcctgcattgtgtgagttctgggattcagactcacagcaaacacctttacccactgagccatctcaccagctctgaaatgatcttaaggggttttaaaatagtattgtaagtgatgtaactttctacatgtgcatgctaagagtcatatgctttatagctgtagacttagaaatgctgcttatagccgggcgcagtggtgcacgcctttaatcccagcacttgggaggcagaggcaggcgaatttctgagttcgaggccagcctggtctacagagtgggttccaggacagccagagctacacagagaaaccttgtctccaaaaaccaaaagaaaaaagaaaaaaaaaaaaaagaaatgctgcttataaggccaatttccagggctggagatgtggttgtgcatttaaatttagtcctgtctcctgccattgctgccaggcagacgtgtgggatacaaacatgcagctaatcacacacagaaaaataaaatttttaactcacctttcacttatggagtcccattttgttttttgaagacaatttagaagacagtttataagatacagcttatgaaatctgttcatagcccagaagtgtattgcaataaaatggtggcttttaagatgctcttttatcctcccagccctcattctctcagagttcctcttcccaccacactcacacatgcacacgaagtggagacttgtggtctcatcgcatgcagagatagaggcagggttagaaagtgggatgcgcagggactcgaggtagccaggatgtcagtgctgccttccactgcagtgaggggctggagactggctggggcgttaggcttcactgtgcttggtgcagctctatctcagcacacagtaccaaatgtaagcagggatatatggccataaatgggtagctagatagttgttttggccatgtaattaatctggaaggtagaactcaaagtggataatgaaatagagttaaaaacctaaatgtttcgggattgtttctcaggtgaagtacccacttacaatgtgtgtgtacgaatgagcaagataaacagagtcagcatgcgtcattcattgaggggaatggtctcaccataaatgagctttgtggtttcttccttttgcttagaagcactaggcacagtccgtgggttgataatacaacataagttacccatttgcgttctttctcatttgaagcttaagaataatacttttagtaatgacttccccatgaaagtctcccttaccacacagaaggcaagtggctccctgcttttaagttaatcccatttggacaaaatgcagggcagtccctggttcaggcctgggtgggcacctgactgcagatgcacgtgaggaagggcaggcagtaggaattgtacgcgtcatgattgtcctttcttccagggatcctccgttgctggggctctggcatgcccacacacagagcagaagtgattgcagagtgggctccacagcccagagaatgtgttttcttaggaaaggtacccgtcacccagcatggaccactggctgtttgctgccaggaatgttcatcgtccacatcacatcggttgcttttcaacccttcctaaactctaacccagacttagagatccttgaagctcataaagttttgttcaaacattttaagtagcattcctcattgaaatgttactgctgatgttaaaatctgtatgtgtctggtctggagcctcacagtgactccaataaggagactgtcatggtgctcttgtgtggttgcttgttcctgggtatgtggttagcttggcctggggctagccttggctactctttgctcctggaagtgctgttatgcagagatgggggtatgagtgccccttctttcactccctcccctctcactgcctggggtctctgctcagagtccagcttgctggagaggccttctctgactcacaggtgggaactacacgcatctctgctgctgttcatttctttgtagttctacaaaactctagtcaccatctgaaatgttactagttattatatgagctcttggaaagcaggccatcacctcctgctctgtgtgtggacccaggtctggagacctggttaagtgagttcttttgatttcaagatttaagtagaggaagaaaggactgctcaaggggacaagataattcttcaacgatgatttgattccgctccagggtgtggagtctgccccacagttctgttgttgagaaaatccaaagcaggtagaggaaatggtgaggggatgacctgtcttctaaagcagtctgacagacacaagacaaggcagagatgtccttatacacttttagttcccctgttaatgccgcgtgaggagaatgccctggcaaaattagcttctaagtgcctgtttctaagcagtgcgaggcaagcctctccagtttgtgctgtgcttctgggctgcagggctggggataggtaggcctgccatgtgtcctcttccctacactttgctctcagaggcctccctcagggtctgcagatgcaaatgccgtgcctctagtttatcttttattttttattggttggctttgaattgggatataatacttgataaagtctataaaccagaagagcacaaaatatgtagaatgaattttacaataaaaacaaaaatcctagagagccatgaccttgtagactgtagtatttgacctatagattttgtctttctatctttgtcatccctctctccctactacacttcctaatttggtagttttccacaaaagaactagagttctcccttccttgagatctgaccctcctgtgtgttcatgtgtctgctcccacccccatctccctaccacacttctccctgtaacttgtgttcccttcggattttgttttgctttgttttggcaaccccttctgctagaactggagtcatttaatcatacagagatgcttgctgtgttgctacctgactcctattgactagagttactgccctgtgctttgaggaagctgtgaggattggatcctggcactggctaagttatgttaaggcccttcctaggtaccctttcagcaagccaggccccaccttatatatatatatatatatatatatatatattttttttttaactaggcctttgagcttttcactctacacagtgtcatccagaagagggtaagcacttgatgccacatctgggtaggacttttcattagaaggtagttctatgtataattcatcccacactgcatggccatgattgcttcttttgttaataataatgatggggtagggaagaaaatggcaaacgcacgtttcctctgacatggaatctggcatgaaaccaggaggggggtagtatactctaggatgagaacgagagcagggcaccgggggtggggtgaatatgaacaatgtataacaaacactacattatacaagtcagaccaacccagcgttgtctacaccaaccaaagcaaaaattaataaaagacatgatgttagagagctcgggtgaccgagatggggctctgagcagttttctgactgcagagttatcataaccttatcatgtgattaccttaaaccaagggagcagtactcacagagccatttgttctatagtccagtgctgtgtgtgctgcattacacaaaggacttaagtcctaccagcagcttttgtttaactttgccaagctcagttctcagtgactctgaaatgggcccggtttctctactaaatattccaatttccgaattggaatctaaccagtgaggctcagaaatatagttcacaatttttaccattacaagcccagtttaattctcatgaagattttagttttatgaatgaagtctttaaaatgcaaagtacatactccttgaatttaattgagtgaaaattggcaataccaacacaaaacttattaggggaaaactaaaagggttgtgtaggacaaccatatgtcccaagagcctggaacagctcagtatgtgctggacagctgacctagttattaacatatgcctgctttcaaaagttctgctttgcggtgtgaattatctggggatgttgccatgtaagaatattgatttaaatatctaaaatgtgggagtgactatttaaattaatattgttaaattaatattgttttgaaaccattttttagaacaaaaggataaagttttgcataatggaactctaatccagacaaagtgtccgtccatctggagcagcgatagcatactggtgtactgtatttaatgaggcgcagtaatgtaaacagctcgcaggaagaacaagggccgagtgagcatgttggcatttgttgcagaggacatgggatacttgctaatgaaaactctagaaggcatttgttagggaagattagatgtgcgcagttgatggctgttcccagctgtgctggaagttcctgggaatagcatgaccttggaattactcagctttagtttacaactgagtggcacagnnnnnnnnnnnnnnnnnnnnnnnnnnnnnnnnnnnnnnnnnnnnnnnnnnnnnnnnnnnnnnnnnnnnnnnnnnnnnnnnnnnnnnnnnnnnnnnnnnnnnnnnnnnnnnnnnnnnnnnnnnnnnnnnnnnnnnnnnnnnnnnnnnnnnnnnnnnnnnnnnnnnnnnnnnnnnnnnnnnnnnnnnnnnnnnnnnnnnnnnnnnnnnnnnnnnnnnnnnnnnnnnnnnnnnnnnnnnnnnnnnnnnnnnnnnnnnnnnnnnnnnnnnnnnnnnnnnnnnnnnnnnnnnnnnnnnnnnnnnnnnnnnnnnnnnnnnnnnnnnnnnnnnnnnnnnnnnnnnnnnnnnnnnnnnnnnnnnnnnnnnnnnnnnnnnnnnnnnnnnnnnnnnnnnnnnnnnnnnnnnnnnnnnnnnnnnnnnnnnnnnnnnnnnnnnnnnnnnnnnnnnnnnnnnnnnnnnnnnnnnnnnnnnnnnnnnnnnnnnnnnnnnnnnnnnnnnnnnnnnnnnnnnnnnnnnnnnnnnnnnnnnnnnnnnnnnnnnnnnnnnnnnnnnnnnnnnnnnnnnnnnnnnnnnnnnnnnnnnnnnnnnnnnnnnnnnnnnnnnnnnnnnnnnnnnnnnnnnnnnnnnnnnnnnnnnnnnnnnnnnnnnnnnnnnnnnnnnnnnnnnnnnnnnnnnnnnnnnnnnnnnnnnnnnnnnnnnnnnnnnnnnnnnnnnnnnnnnnnnnnnnnnnnnnnnnnnnnnnnnnnnnnnnnnnnnnnnnnnnnnnnnnnnnnnnccataccaggtttaaaaagacctttttcgagtagggtctcatgtagtccaggttagccttagacttgctatgtacatcaaggataaactttaacttctaaatccccctgccttcaccttttgagtgttagtatcataggtattcctaccatgtccaattttgtgctgtactaggattgaattgaacccaaggttctgtgcatcttagtcaagcattctacatcttagcctctcaaaatgtttttgtaatgaaagacatcagcctttcagaaatcatggaacttcctgaaagttaagattattctaggagtgtcttatgtttccttcagtgtatagctggatggcttctttgtgtaaaagtcatgtttggttgcagtcgcaataaacatacagaagaaatctgttggacagcacggggggccactagccactcagagcatggactttgttgttgttgttgttcactttctcttcaaccccacttatttgtatcttgtaatgaacttacttggtttaaagatagatataacacaagattccttccaatcaaactttaaggcccctacagcaacttaactttaaaattctcagcctattttaatgcttccatagccagctagtgaatacttgctcctcatattgctatcattactaggtgctagatagatcctatctagactctagaaactgagaaagtatggcaaaagattgcctctaagacactttagaaatgtgtatccttgcaagtctgtaagaagtaattggccagacagaaagaaacagccacccatgggagtgtattgcaaagagggtgtctgttggcaccctccttcccacatgtcagatattgtccagataaaataaaatcagattatggtaggaactgtaagtactacactaaagacagtcttgaaggacatgtggtttttttgtttgtgttttaaagtgctaatgctcttagatttgaaaatatatcatggttagaggattctaaccttgtctgtatgcactatttgccatatttaatatatcatatttgcctttatcaacaatttaacattgaaataattcaacaacttctcaatatcttgctatgcttaaaggtttaatactccatcatgaatctgtcagctatatattaagcatcttaaaacatgtcaggcccaggtcggtccctggtgacaaagtcaataaacgtcagagccttctactaccgagactttgtgcgtggtaatgctggattgtgccccgtgtgttttggattaagtgttactgtcttctctcatgttagagaggcatagtcttcaaaatattctaggaaaagaaaagtgcaagataaatgtgaacctgcattatctgaagatcttttctttatcctttcttggtggatagtttagctgggaaggtaaatgttcattgagggtggctttctctttccctgctttggaaaacattgtgctggcagtagtatctgcatccagtatcattgtagcttaagtnnnnnnnnnnnnnnnnnnnntgtccgtcctctggagcagcgatagcatactggtgtactgtatttaatgaggcgcagtaatgtaaacagctcgcaggaagaacaagggccgagtgagcatgttggcatttgttgcagaggacatgggatacttgctaatgaaaactctagaaggcatttgttagggaagattagatgtgcgcagttgatggctgttcccagctgtgctggaagttcctgggaatagcatgaccttggaattactcagctttagtttacaactgagtggcacaggtcctgagatatcttagagcagggagatgcctctgctggagccaagatggtagagggactttgtgagacaaagaataagggctgtttcaacactggaacgcaacccataagttttttaaatgttttaaacatttacaaagggttctgtgatttttaaaagaaggaataaccttgtaattattaaataaaagattttcattagctaatgttttgtttactaagtaccttttaactttctgttatagtattcttttttttttagtttttccttccttccttccttccttcctttctttctttctttctttctctctgtctgtctctgtcagcctttcttttctctctctctctctctctctctctctctctctctctctctctctctcggttttgggtttttggagacagggctcttctgtgcaaccctggctgtcctggaacttgctctgtagaccatgctgacctctaactcacagagatccgcctgcctctgcctccaaagtgctggggttaaaggcatgcactaccaccgccttgctttatagtgtgttcctcttaacattcaaattataaatgattgatgtactgtgtggtaataaaatgctcttaaactctaaatttggtgtgtgtatttacaagtatatatttagataatgtttgcccgtatagcctagcttgcctggacctcctgagtactgggattacaggtacgcatcaccataccaggtttaaaaagacctttttcgagtagggtctcatgtagtccaggttagccttagacttgctatgtacatcaaggataaactttaacttctaatccccctgccttcaccttttgagtgttagtatcataggtattcctaccatgtccaattttgtgctgtactaggattgaattgaacccaaggttctgtgcatcttagtcaagcattctacatcttagcctctcaaaatgtttttgtaatgaaagacatcagcctttcagaaatcatggaacttcctgaaagttaagattattctaggagtgtcttatgtttccttcagtgtatagctggatggcttctttgtgtaaaagtcatgtttggttgcagtcgcaataaacatacagaagaaatctgttggacagcacggggggccactagccactcagagcatggannnnnnnnnnnnnnnnnnnntgggattacaggtacgcatcaccataccaggtttaaaaagacctttttcgagtagggtctcatgtagtccaggttagccttagacttgctatgtacaccaaggataaactttaacgtctaatccccctgccttcaccttttgagtgttagtatcataggtattcctaccatgtccaattttgtgctgtactaggattgaattgaacccaaggttctgtgcatcttagtcaagcattctacatcttagcctctcaaaatgtttttgtaatgaaagacatcagcctttcagaaatcatggaacttcctaaaagttaagattattctaggagtgtcttatgtttccttcagtgtatagctggatggcttctttgtgtaaaagtcatgtttggttgcagtcgcaataaacatacagaagaaatctgttggacagcacgggggccactagccactcagagtgtggactttgttgttgttgttgttgttgttgttcactttctcttcaaccctacttatttgtatcttgtaatgaacttacttggtttaaagatagatataacacaagattccttccagtcaaactttaaggcccctacagcaacttaactttaaaattctcaacctattttaatgcttccatagccagctagtgaatacttgacccccatattgctgtcattactaggtactagatagatcctatctagactctagaaagtgagaaagtatggcaaaagattgcctctaagacactttagaaatgtgtatccttgcaagtctgtaagaagtaatcggccagatagaaagaaacagccacccatgggagtgtattgcaaagagcgtgtctgttggcaccctccttccaacatgtcagatattgtccagataaaataaaatcagattatggtaggaactgtaagtactacactaaagacagtcttgaaggacatgtggttttctgtttgtgttttaaagtgctaatgctcttagatttgaaaatatatcatggttagaggattctaaccttgtctgtatgcactatttgccatatttaatatcatattcgcctttatcaacaatttaacattaaaataattcaacaacttctcaatatcttgctgtgcttaaaggtttaatactccatcatgaatctgtcagatttaagcatcttaaaacatgtcaggcccaggttgggccctggtgacaaagtcaataaacatcagagccttctagtaccgagactttgtgtgtggtaatgctggatctggcctgtgtgttttggatcaagtgttactgtcttctctcatgttagagaggcatagtcttcaaaatattctaggaaaagaaaagtgcaagataaatgtgagcctgcattatctgaagatcttttctttatcctttcttggtggatagtttagctgggaaggtaaatgttcattgaggatggttttctctttccctgctttggaaaacattgtgctagcagtagtatctgcatccagtatcattgtagcttaagttcttaaaatctgtgtgtgtgtgggggggggtgaggatgtggagaaggagatgggcagtgtggtgcagcattcttgtggatgtcagaagacagctttgtgggttgattctctcctctcctgccctgacatgggacccagaggtcaggctcgggtcatcgggctcacctggcacgaacctcacattgaccaccatccagatccctcttgacatggttttagttgttttgtccttggcattctaacttgcattccttatgccaagtacctagggcctgaccaagtgtacaggtcctggaattctgaacccatttccatgttctctctctagaatgattattacattgttatcccaggttccttgggagattctccactatcttgaacactattccccaagtttaattccaaggcctttctctgctctctctttctatattaaacgtctcaggatggacacacacacacacacacacacacacacacaccaagtctctttgagggatgaccagtggggtctgtgctagatgacagggacaatggaggagtgaggtcctactacagtttcaaaggtcactgctctgcgctgtcagacacgcacctcactcctccttaggcactcagttactttcttacagttttgattgtgagcatagccttcaatggctgcaccatctctccagcccttggttaatttttcgggaaagtaaacgtgagttatgcgatttagaatcaagaagtgactactgacaagaggaaaaatagcctatagataatcatttaccttcaaaaataagtattgcaagtgatgatcttttagtgttgaaatctatttctgttacctgccaatcctaatttagttacagctcttggtcgatactccctggtgcatttttaacaaaagtgtgccaccacccctgtgtagatgacagaacagcttagaatgtgtccgtgcagattctggtgtctccaacttctgtcctatttcctgccgctgtggttcccaactgtacagagaacccggggatcttgctgtcctacatcctctgctcttctttctcttctccctgtgttccctgcctcacagccctgtcgttgtggctctctagctaagggagttggctgttggcctccatcctcctccacttgatctcattgcctcaggaagtagggacatccctcatgtgcagcggcttctcttgacccgttctcttcatgttgtctgttcattacttttatgcttcttttttttttttcactttttttttcatggagacatttgagaagagaagagggcaaattatgcaagttctgacacccatattttagctgtaactctccagttaccttctcagaatgccccattggctgctgtgtggggcaaattacccaccaggcttgaatttgaagtcagagggagagggtctgagacctggcagggagaggaactgaacatccgtgcatgcttctgactggtctcctctaatttagaaagccaagtcaatggcttggatgttttcattcttggaaatatcatcgttcaataatgttggtatttcctcaatttgctgtgtaagtttggaagtgatgagcagacaggatggcagtagtgcatgtattggagcaaacgcacatgagcggtctctgttctgaagcttggcagctgatgctcaccacggccgaactcctcaccatgtggagtcagtgtgtgtccagtggctcctgtgaagtgggagccatggcatcttaagagtttagaggcggggctgtgagatggctcagcaggtaagagcacccgactgctcttccaaaggtcctgagttcaaatcccagccactacatggtggctcacaaccatccgtaatgagatctgaagacagctacagtgtacttacatataataaataaataaatattaaaaaaaaaaagagtttagaggctcagttacctttggggcttatagttataaaatatgtttatgaatatgaaatatgaaagacttttagtacctgtaaagaaaatttctaaattccagtcatcattttgagttctggagtcttgctatggtgctgccctgcagttagaaagaaaccggtaaaggcgctgctgccaagttgaggaagttgtctcatcctagcagctggatatatctgaatctgctttggccagttgcttctctggcccagccatgtgtcgtggaggagtgggatcgagcactgtgccttatgtctctgactttctctccgaagtctttgtttatagtagggagcctgagatgcacggtagtacccactgtgcgctatgatccagttggctgagcagcaacaagcaaaaacccaccacttatggtggcccacagtacactggttcccctgatcacacaagagagttgcagttggtctttgttcccttaaattagatagactctttttaaatgctttcttaatttctttttaacttccattttctttatggttttgttttatttatttatttttagtttttgagacaggatctgattatatacctgactgtcctggaactcactatgtagaccaggctagccttgaactactcacagagatccatctgtccctgccttccgggtgctgggattaaaggtgtatgacaccatacctggccatctatttcttttttaaaaagaagctggtggggggggtggtcagaacaacaacaaaacacttcatctgcagagcttagctctacagacccagagctgcagctctcataattttgggccgggtccttagcttcttggggccattcattggctaatgtctcgttgaaatgttacattaggctattgctgtccgttaacttctgatcttacgtggttgctactcactgnnnnnnnnnnnnnnnnnnnncattctaacttgcattccttatgccaagtacctagggcctgaccaagtgtacaggtcctggaattctgaacccatttccatgttctctctctagaatgattattacattgttatcccaggttccttgggagattctccactatcttgaacactattccccaagtttaattccaaggcctttctctgctctctctttctatattaaacgtctcaggatggacacacacacacacacacacacacacacacacacaccaagtctctttgagggatgaccagtggggtctgtgctagatgacagggacaatggaggagtgaggtcctactacagtttcaaagctcactgtgctgcggggtcagacgcgcacctcactcctccttaggcactcagttactttcttacagttttgattgtgagcatagccttcaccatctctccagccctcggttaatttttcgggaaagtaaacgtgagttatgcgatttagaatcaagaagtgactactgacaagaggaaaaatagcctgtagataatcatttaccttcagaaataagtattgcaagtgatgatctttagtgctgaaatctatttctgttacctgccaatcctaatttagttacagctcttggtcgatactccctggtgcatttttaacaaaagtgtgccaccacccctgtgtagatgacagaacagcttagaatgtgtccgtgcagattctggtgtctccaacttctctcctacttcctgccgctgtggttcccaactgtacagagaacccggggatcttgctgtcctacaccctcttctcttctttctcttctccctgtgttccctgcctcacagccctgtcgttgtggctctagctaagggagttggctgttggcctccatcctcctccacttgatctcattgcctcaggaagtagggacatctctcatgtgcagcggcttctcttgacccgttctcttcatgttgtgtgttcattacttttatgcttctttatttcctttcatggagacatttgagaagagaagagggcaaattatgcaagttctgacacccatattttagctgtaactctccagttaccttctcagaatgccccattggctgctgtgtggggcaaattacccaccaggcttgaatttgaagtcagagggagagggtctgagacctggcagggagaggaactgaacatccgtgcatgcttctgactggtctcctctaatttagaaagccaagtcaatggcttggatgttttcattcttggaaatagcatcgtgcaataatgttggtatttcctcaatttgctgtgtaagtttggaagtgacgagcagacaggatggcagtagtgcatgtattggagcaaacgcacatgagcggtctctgttctgaagcttggcagctgatgctcaccacggccgaactcctcaccatgtggagtcagtgtgagtccagtggctcctgtgaagtgggagccatggcatcttaagagtttagaggctcagttacctttggggcttatagttataaaatatgtttatgaatatgaaatatgaaagacttttagtacctgtaaagaaaatttctaaattccagtcatcattttgagttctggagtcttgctatggtgctgccctgcagttagaaagaaaccggtaaaggcgctgctgccaagttgaggaagttgtctcatcctagcagctggatatatctgaatctgctttggccagttacttctctggcccagccatgtgtcgtggaggagtgggatcgagcactgtgccttatgtctctgactttctctccgaagtctttgtttatagtagggagcctgagacgcacggtagtacccactgtgcgctatgatccagttggctgagcagcaacaagcaaaaacccaccacttatggtggcccacagtacactggttcccctgatcacacaagagagttgcagttggtctttgttctcttaaattagatagactctttttaaatgctttcttaatttctttttaacttccattttgctttacggttttgttttatttatttatttttagtttttgagacaggattctaattacatacctgactgtcctggaactcactatgnnnnnnnnnnnnnnnnnnnntcatcattttgagttctggagtcttgctatggtgctgccctgcagttagaaagaacccggtaaaggcgctgctgccaagttgaggaagttgtctcatcctagcagctggatatatctgaatctgctttggccagttacttctctggcccagccatgtgtcgtggaggagtgggatcgagcactgtgccttatgtctctgactttctctccgaagtctttgtttatagtagggagcctgagacgcacggtagtacccactgtgcgctatgatccagttggctgagcagcaacaagcaaaaacccaccacttatggtggcccacagtacactggttcccctgatcacacaagagagttgcagttggtctttgttctcttaaattagatagactctttttaaatgctttcttaatttctttttaacttccattttctttacggttttgttttatttatttatttttagtttttgagacaggatctaattacatacctgactgtcctggaactcactatgtagaccaggctagccttgaactcacagagatccatctgtccctgccttccgggtgctgggattaaaggtgtatgataccatacctggccatctatttcttttttaaaaagaagctggtgggggtgggggtggtggtcagaacaacaacaaaacaccttatctgcagagctttgctctacagacccaaagctgcagctctcataattttgggccgggtccttagcccttggggccattcattggctaatgtctcgttgaaatgttacattaggctattgctgtccgttaacttctgatcttacgtggttgctactgactgggtgagtctagccttctgggtgctgttcccttgtgtttagagttggtggttgtctgaggagatgtaaggacggagtgacacttacttacgcagttctaaaccagagtcttttctttccttaacagatgcagcagcttttttatgagaattatgaacagaacaagaaagggtacattagagatctccatagcagtaaaatccaccgagcgatcaccttacaccccaacaaaaacccaccgtaccagtacaggctgcacagttacatgctcagccgcaagatcgccgagctgcgccatcgcacgatccagctccaccgggagatcgtcctgatgagcaagtacagcagcacggagnnnnnnnnnnnnnnnnnnnntacagacccagagctgcagctctcataattttgggccgggtccttagctcttggggccattcattggctaatgtctcgttgaaatgttacattaggctattgctgtccgttaacttctgatcttacgtggttgctactcactgggtgagtctagccttctgggtgctgttcccttgtgtttagagttggtggttgtctgaggagatgtaaggacagagtgacacttacttacgcagttctaaaccagagtcttttctttccttaacagatgcagcagcttttttatgagaattatgaacagaacaagaaagggtacattagagatctccatagcagtaaaatccaccgagcgatcaccttacaccccaacaaaaacccaccgtaccagtacaggctgcacagttacatgctcagccgcaagatcgccgagctgcgccatcgcacgatccagctccaccgggagatcgtcctgatgagcaagtacagcagcacggagatccagaaggaagacctccagctgggcatccccccctccttcatgcgcttccaggcccgccagagagaggagatcctggagtgggagttccttactgggaaatacttatactcagccacagatggccagcctccccgcagagggatggactcagcacagagggaggccttggatgacatcgtcatgcaagtgatggagatgatcaatgccaacgccaagactcgcgggcgcatcatcgacttcaaggagatccagtatggctacaggcgtgtgaaccccatgtacggggcagagtacattctggacctgctgctcctgtataagaaacacaaagggaagaagatgacggtccctgtgaggcggcacgcgtacctgcagcagaccttcagcaagatgcagtttgtggagcacgaggagctggatgcacaagagctggcagacagaatcaaccaggactctgggtccctgtcattcctgtccaattccctgaagaagctcgttgccttccagcttcctggatccaagacggagcacaaagaacccaaagaaaagaagatcaacattctgatcccgttgtctgggcgcttcgacatgtttgtgaggttcatggggaactttgagaagacgtgtctcattccaaatctgaacgtgaagctggtcattctgcttttcaactctgactctaaccccgacaaggccaaacaggtcgagctgatgcgagattaccgagtcaagtaccctaaggctgacatgcaggtcctgcctgtgtcgggagggttttcaagagcactggccctagaagtaggctcttcccagtttaacaatgagtctttgctcttcttctgtgatgtggacctggtgtttacagcggaatttttacagaggtgccgagccaacacagtgctggggcagcagatctatttcccaatcatctttagccagtatgatccaaagattgtttatagtgggaaggttcccagtgacaaccattttgcctttactcagaaaacaggtttctggagaaactatgggtttggcatcacttgtatttacaagggagatcttgtcagagtgggtggcttcgatgtctccatccaaggctgggggctggaggatgtggacctctttaacaaggttgtccaggcagggttgaagacattcaggagccaggaggttggagttgttcacatccaccaccctgtcgtctgtgaccctaatctggaccccaaacagtataaaatgtgcttggggtcgaaagcatcgacatttgggtccacgcagcagctggccgaaatgtggctagaaaagaatgaccccagttacagcaaaggtggcagccacggctctgccaggacagcctgactccggccccactgcggagaacgttttttaattgcctaatttatttttaaaaagtttttgtataatcagtttttgaagtccatacaaggatatattttccaagtggttttcttacacaggactccttaaagattgagctttttgaacaaaaatgtgatcaatgtttgccttcgaacacaccttgctgaacactatgtagcaccggcttaatcctgacttgaagcatacccgatgaacaaaactttggtataagaatttttttgtttttggtttttacatttcttttccagacaattcccctgtctctgtagtcctaaggcagaaagctggaacattcctaggaagtctcgtcaccgtgatcagagcactgtaaccctggtcgatgctgagactgttaacttgtctctgggaagtgttctgctgtggctgtcacctgtcacctttgcacaaactccacctttttcctttttttttttttttaaactgttttttttttaagccatcttgagttccagtcataaagtaggcaacatgatagtagttgtgttgtcactctctccaagacagctttccaaatttgattattcccccacgtgctccacccaccgagggtcgcgcaggctttcccagcgggaggtggagggaagcacagaggtgctcgccccactgaactcccgtggcctcaacggacctggcactgaagtccaagaaggacttggcattttctctgccccaacccttctttttagagggtgcagtattattaagggggacagagtggctgttagcagtgtaatgagtgcgagctaaacagacaaacctctaatggaagtgtgagggaagctggggctctgctctctgtcctgtgctgtggatggagatggctgcttcattttttaattactgggttttctatcttgttatatgaaatacctttaatttatttaatatacccattgttttagatctctgccattttgagtacttgtcagttactagtatttatgtgcacggtgagtgtggttagaatattttatttgcagtaaactgatctccaaagatttccttttgaaaacactttttcctcatccttaatttttacattcccgtcttactaaagattaagtgttctttgataattttggtgctcatgtgttttggggacaaaggtgaaatgagtctgttgtcacaccagggtgtttgttttcaactcacagatccaatgtgccttaagaattggttttcatttagagttcagacagttgatagagttgccatttttaatatacatcgttggagatctgcttatttgtaaatagcctattgcacactcgaacaaataaaccagtggacagtatttttctattgtactctgcagacccattttgtctcattatttgtgttggttgaagacttgagttacatttggagagtaaaacactgaagcacggacttccttccagcctttgcagcgctgagtcggtgcttctgtggctgcagggggagtggcgtggagcgaactcctcaaggaggagctgctgactcccgtgtgaagcccagagggcctcaggccaggccaggcctctgcctggctcttggctacaaatcactttcatctgccaggggatcacctgttaagcagcatcccaggtaaaaaccatcaccaactgatggcttggggttctaggctccatctagccggagaaaaacttgcacatcagttgctgtagattcagaagtcaaaaagtgacctccggtgctattcgccaggttcagtagatgacagttataccctgagagaggcatccacagtgtgacgacacttgggtccagaacaatggcatcatgctcacagaactgctgtaatctgcctagctgccatccagtccctgcaggttgttgggtttgcttgtcttttttcacagaggaaacctgagctgtccgtctttacccacagatgatgctgtgcatctctgtgcaccggtattctgacaccacactgtgagcctcggggcaggagacacacagagcagagggacaccaggctaaacctgctccttcctcctctacccccactgaccgtctaccacacgtcttggtgacgttggtctcccctgctccccagctatctccaggaatgccattggtccctttcccagttccctgcctctgctaaaacctgtgatacctgctgcctccccaagttcaagtcttgtcccatcactccatggtgtccccagtgtccttccaggggctattctcaggaattcctcttgtctcaggccctcaatgtgcacactgcctggtgacctactcaggacacctcctatagacacacagtaggctctgccatgctgaaacaccccagtatctacacagacatcgccttagatcctcccaccctgagtggatgtgactggttgaacttgatcctgccctcaggccacttccccctcatcagagctcctggaagttgcacctgggcttcttggtgttcctggttccctggtgtgttgggaacaatgctgcctaggcttcccagcgggattcccaccaaatcccgtagtcattgcatgtgctgaagtctgccaccctaactgtggaccaatactgccctcgagccccagaaaagctttcagttgatgccactgtttctcacttgccaatactttgttctgcctgggttgctttgagacaagatctcactatatgactgacttgaaactcactctgtagaccaggctggcctcaaatcagagatcacctgcatctgcctcctgagagctgggattaaaggcatgtgcccgcaagcctagctgtgttatcttatttttaataaaatgtattaaggaattagaatggcccatatattctcagcacactttaaaatttttggtaatatttttttagattaagaatgtgtgtatttaaggcccagggaataggttattgtgcagaagggcatgccgatggaagcttctctttccaaccatcctcctagcccaagacttcccatagtggaccaccagatttgtatgcatcttggtgaagaaagtgggtgcatgtgtgtatgcaatgaaacaaagagtgtatcctataacagagaccctggcaggaatatctttgggttcttgggatgtttcagggcagagtttcatggccctctgctacctggagacatttgggctgacagggctggcaggtgtgagtgcagtggttggaggagtcagtcccaagagtggtggactgggatggtcacagagagccatggcaggtgttggtaactggtacatctcattctgaaggaagaagcattttgctggacctcatagcctgggccagggtaaggctggcactgggccttgagccacaataccctgggatcgtcgtgtttcaaaaggaaggtgaggggcatacaggaccatgaaacacccattctctgggctgtagacacaggcagagcctgggatagaaggtggagctgtacccttcactcaagtctgaaagcaggaaggggaagtcgaaagcgttcatgagccggccaatcaagttccaactctgagcaagtctgtccgcacctccttcctgcccagccttgtccacatcctgttttaccaaaccctcaagcccaggtcccagcccaggagtaggtatgaggtgtctttttccccagattgcaggctcagggactttgctaacacaccctttgcatgctgtctgtcctggtcaagctctgcctccttccttccctggaaggaccactcaagggtctggcgttctctgcaggcagctttattcattatccagtgtgctcatagtcgggggacacttctcatctgggaagggaatgtttacattaaaagaacctgcaagctttcaggtgtgttactgtggcaccagtgtccttgtctttcaggacacttgaaagtgagactcttagctgctgaggtccgatcaagtccccagggccttaggggtgccaggtgccagccctccccaccctgaacagcactagctctggggattaggcttccttactggtggttcaaagacctgtaatctaggttacaaagaagcttatgtgccacgcgaccagagccagcttggtctgtgtcgcctaaggtgactgcacagggctgccttccacctaggtgagtcccatggtatttcataagcccttgaaagaagtcatctgttgttcttggaaatgtccatcgtgcatttgcttagtctgactcgtaaatgcaatgaagatgtaagagtcggaatctagtggtgcaagccacagcaacgtgtactttagtatttccattagggaaatgtagcgtttgttttcccaggctggagagtttgcttgcttgcttgcttggttgttgaatcgttttgaagggatgcaaggaatgggtctaaatcttcagaaaccacaggtccaaccagagcagaacccagcttattgttagtggagttaaaccgttgaagattctgttgccgagtatcttagttcactgttaactaagctgcagttacaggctttatgttttaataatctaaaccaaaatcaaatgtctacctttaaagaacattctagccataattcctttaagatagtaagagtagtcatgctagattgcctttaatgagaaggttagacaatcggccaagtcatctgatggggcagataagaagccctgtagtctcgaaggccttgtctgtgatgagctgttctctgagtgagacggtccaagatagctgagctcatgaggctcctggcggctccttctgtgactcctcacagccccttgccctttggaagcctcagttgctctaagtaccttctcctttgagcacagaaaattcttctggttggacttcaaagtgacctttaacctcattcattctggatgaaatgtggctcttcagacaaagctagatcctattcccataacttaaagggggtccttgtccccatgcctccacaccccatgctgaagctagaaataaggacctttctgaaagtacgctttgaaagagtctcagtattgtaaaggaagtatttcaagcctccgttggattaaaaatagggagaaattctgtctactaaacgtgtataggctttttgccctttttgttgcagtggtacacggtagtaggtattgagttagaggtgatttaaagctacaggaagaatatttgtaagttctgtgtagatccgacaccattttctgtaaaagattgggtatcacagattttggcagggaccctccaaccaatccttgggtaactggggtttgaccatctgtgacaacgtgcaggcaactgggagttcatttggtccacagtgacacattgtacccgctagcatttctaataaggctgacagcatagctcaatggttaggagtgtacattgcttctagagaacctgagttgtgttcccagcatccacatagggtgactccagtcccaggacctctagccctcctttctgggcctgcgggcacctgcacttccgtgaatatgttttctcacagacagcacatctaaaaataaatcttttttaaaaatttttttcgaattaaaaccaaataaggtactggaatatagctcagtggttgcacacttacctacctactctggctttgagccccagtaccacgcaagcacaaaacaggcataaagaaacctgaacaaccaaatcatatctgagaatcactgtgggaagacagtgctcagtatgttgttggctgcaccatcctaggaaaaagagctactcccaaactcaaccccatggccacaaaacttgagtcatggcaaaacaaagagagggcagacataatggtgagtcaggcgagcttcaggcacatggccttttagggaatgtggtccactcggagccttgccctggagacagatgagaaatggaagccgccagctcaccatagggggttcctgacatgctggcatggcagtggtgcgggataaagcggggcagtgccaccaggtgtccctctagaaaccaggtatggtttttctggtgggaaaatgcgtatttgcaaatacatgggggtgaacttgattggcaaccatggagctacttaacctgtgccctaggctagttttgaaggctattttataaaatgacatttaataggtgctagttaagattttttttactgtcgattggggatggtggcatacacctttaatcccaacactctggaggcagaggcgggtggatctctaagtttgaggccagcctggtctacagagcaaattataggatagccaagactacacagaaaaaccgtgtctcaaaaaaacctaacaaaacaaaacaaaaaaacaagaaaatggatgttggctttgatgttcccggaagacccagtacatcactaagttggaagatagtgtttagccatgggttcgttccagcaatgaagactccacaaatgggagttgtatcagaagagtgggcaaaggaagcagctgggcagggacagcacttgtcccacccccagcaccagtgccctgaggatttcgttagggaccttgggctgcagggaactgaccatagtcatatctgccctagcgactttccaaggtccagaggtagatgtggcaaccatcactgggaaatgagtttacattatgactcgtgggtctttaaaattagattcaaaggtgggcctttccccctgagaggctgtgccctcaagctcctgagtgccagccatttctctgagatggcttgtcagggcagtgactgtctgggccacatccttgggcggatgtgactggtagatttcatcagtgtggacggattggaaagccctgtccagccccagctggtttcctgtgggtctgccagaagtcgctgggcagccttaggtgctgtgcctgcccagaagtttcctctcagctgccagggccagcgctgaagcaaggaatatgtttggcttccacttgcttctgttagctcagaggctgtaggcatgcgcacaccatctctctagcctcccctcatgtgagggctgctcagggtggcgcttccctttgaaccgcagctaattgctccctgactgctccactgcgcaattccacccagggccctctccctacctcccgggaggagtgccccatagcaagcatccttcctggctgcctctcagtttcaaatgaggaggaaaatattcatgagccccaagactcagaatcacatagaattccaaagaataggtataaaactgccacagattgtccgaaaaagaagtcatctgagagaattcgaggttgccaacgtgcaacaggaatgctgtgcaggctgaattctgattgtgacatcaggaacacaatctctacttgggacaaacaatggctgtgctttggctctgagtgaacaggtatccgttacctcaaatctaggaccagtgccagtctgtggctctggggtgagccagagaaccggatgcaagcatgctaccctgctccctgcatctcagccaacatcactgaaggctgttgccttactgtgactctaaattgggagggacgctggctcagctgtacatcctgaaataccaggtgacccagggctcaagaccagaggaaggataacgggtcttcatactgtgggatgtatctgagtagcccactttacagataacccgtggttacatagactcatgagaatgtgcagggaagggtgtctacacaaaggactgtcacgccattccccttacacaagagccacaggctcggaaccaaacagaactgagtttgggtcagcagtgttctgggccagctcagactggagaagacgcctcatttccagccctgcctgtgatatcacaatgcgagtcagtaatcatttacacttcaggaaatggccagtgcttcaaagcaggcttaattttttttttctaagttggttttgccacaaagcactggtttgagtcaactccatagacctcaggtcccaatctgctgctatgtgatcttgggcagatttcctgtgtcagagtttggtttcctgctctgtaaagagggcatggttactcatctcctccccaagactgacggggtattttgtggttttatgtcagctataatggcaagtaccatcaccacctgtcatgtcccctgaaactactgcttgatccgaccatcctgcactttacccagtggtcctcagctgcctttctgactttacctgtccacataacccctgcctcatctctgcacccaagcatgaaccaggagaacctgagctccagtcacgtggcatctggagtaccccttcccccttctgggcacacctgccgacttggccagtaccagcctcggaccaaggtttcttccctcttgtcaaagcaggttctaggttttagctgcaaatgccaaatcttcacttccctgtgacccagctagcatagcggactgggcaggagcaggatccagccatcttggagccccatgagggatgtgataagtcactgtgcaaagccgagttagtcagcctttgtgttggctggggtatgtgtcaaaggaaaatcagagctaaaatgagatactcctataaaggcagctgtggctttcagcttttccaagaaaaaaaccaaacggctctcagtgaaagacaagagccacggaatacctctcagctggaatcctgaagtgagtgttcctgggtcagtgactcagtgcctagcactcaagggctgttacctcattcatggctctctctgtgcctgtgaggtctgtgttcctggccttggcttctgatgagaaactgaagctcagagagcgtgagtaacgtgcctagggtcacagagctagtaactgatagatctgtccaaacagatgagcctcattctggtagctggtgtgtggtggcgatggaggtggggatgggaatgtgttacgtgttttgcttgtcagggatataagatcctcagcttagagtactcacctactaccaggaaatggtggtcactgaacggagtcaactgtttaagagctaaagactcatacataagagatctttaaaacttttctccaccttaaaaaaaagttaaactctttgattgtgaatcggccagtctaggctacatagtaaaattctgtctcaaaaaaaaaaaaaaaaaaaaaagtagtattttgtaaaggtttcatgtcttagtgtattttccactgccacaacaaaacacttgccatcaaatactttatgaaaggtagaattttattggctcacagtgctggggactgggatgtcttggtctctggtgagggtcattggtgtggtggagggcagctcatggcaagactgaacaagcactctggatttggtctcttgttgttgttgttgttgttgttgttgttgttagacatcagctcctgccagcatgggacccatctttacaaccttccaaaatctcaccttcaaacaccatcagtgtgtggatttcaggattaggtttctaacacatgcatcttgggggtgggggaagcgcattcaaaacgagcattcaaaacgtgtgtgttattcagtacaaaatagaagaagaaaaaaaagtttcaaaataggcttggaagattttagctccaggaatgataggatagtttgtatcaaattaaccctcttacagacagtaactgtccaccccagaaaaggcaacaaattttttaaaaatgtaaatgaagaaatgactcagtttttaggaggcctgcctgttctttcagaggacctaggtttgacttccagcgcccacagggtgatttacaaccatctgtaactccagttccagggcatctgacgccctctcctgccctctggcggcaacacatgcacatgatgcacagacagacatgcaggcaaaccatccattcacatgaaaacttaactaattagaatcaacaactaagatgccggtgaggctctgagatcatgaccagatggggccatcctactctaaaagaagggatcttcactgggtgagatacacattgaacagagtagaccacttagaagcaggggcggggggggggggttaggactggagtcccactgttcttggcttgaggtgctgtaggaaagagtttggagctgccagagcagctggcggtggggagggaggtctcaggacgaagtggggccagaggctggaatgactgagcctacaagtctactcctctccaaccctcaattgaattctaagtttgtttgcatggggcagactccaaggaaccaggagaagcaatagctggacatcctgcaaaagcaaatcagattagctcctgctgcgggggaatcagaatctcattaaattagagagccaggctgatggctcagtgggtgaaatcctaccatgtgaacctgatggcctgggttcagatctccagaactcacataaacggcctcagcctcgcactggacgcaaaacaagacccgggctcaccgttgctgttctgcgttgacccaaggcctgatctgcagaatggactgtcaggagatggctgctggactcagcccaggaccccacagatcactgtcacattctccctagtccttgcagggccctctctctatggcagtggttttcaaccttcctaatactgcaaccctttaatacagttcttcgtgttgtggtgacccccagaccataaagttatttcgttgctacttcataactgtaattctgctactgttatgtatcaaaatgtaagtatctgtattttccaatggccttaggcgaccattgtaaaagggttgcaacctggggtgttgctaccccaaattgagaactgcggattcatggggctctctggcttctgctcactggtactgttttcctgactcaggaaatgtgtgtcaccttcaacatctcttctgtttcactgtcctcagcatagccaggcacagggacaaatgtgggatctggcttgtacctcaaggtgccagtcttaggttagggttgcagctgttcctaggtttccaagaacctagagtcaagacagatggccccgatggagaccacccatctccacgctgtgctctcacttcaccacgtgggcttgagctaataacccagactcacctttgttccaattgtgtggttgggaggtggaactcaggactcgagggctagcaagtgctttaccccgccccagtgcttctgaagtttaaaggcaagcacttaaccacagctggtcctcaacttacaataaagctctgtgctggtaaaccacccacagacagaaaacactcacagtaaaacatgcattcccgcgagctgggagtgtaacccagtggcagagctcttgtctaaagcatgatgctgtgtatcagat

SEQ ID NO: 582 - DNA, 3805 bp, Mus musculus
atgctgctcgggctcgtgctgggcttcgtgctggcctcgcggctagtcctgccccgcgcctcggagctgaagcgaggctcggccgcggagggcgtcccgcgcgacaggaactttctcttcgtgggagtcatgacagcccagaaatacctgcagacccgcgccgtggccgcctacagaacatggtccaagacaattcccgggaaggtggagttcttctctagcgagggttcagatacatctatacccattccagtagtgcccctgcggggtgtggatgactcctacccaccccagaagaagtctttcatgatgctcaagtacatgcacgatcactacctggacaagtacgagtggtttatgagggcagacgatgacgtttacatcaagggagatcgtctggagagtttcctgaggagtttgaatagcagcgagcccctcttcctcgggcagacaggattgggcaccacagaagaaatggggaagctggcccttgagcctggagagaacttctgcatgggcgggcctggtgtgattctgagccgggaagtgcttcggagaatggcaccacacattggcaagtgtctccgggaaatgtacaccacccatgaggatgtagaggtggggagatgtgtccggagattcgcaggcgtgcagtgtgtctggtcttatgagatgcagcagcttttttatgagaattatgaacagaacaagaaagggtacattagagatctccatagcagtaaaatccaccgagcgatcaccttacaccccaacaaaaacccaccgtaccagtacaggctgcacagttacatgctcagccgcaagatcgccgagctgcgccatcgcacgatccagctccaccgggagatcatgcagcagcttttttatgagaattatgaacagaacaagaaagggtacattagagatctccatagcagtaaaatccaccgagcgatcaccttacaccccaacaaaaacccaccgtaccagtacaggctgcacagttacatgctcagccgcaagatcgccgagctgcgccatcgcacgatccagctccaccgggagatcgtcctgatgagcaagtacagcagcacggagatccagaaggaagacctccagctgggcatccccccctccttcatgcgcttccaggcccgccagagagaggagatcctggagtgggagttccttactgggaaatacttatactcagccacagatggccagcctccccgcagagggatggactcagcacagagggaggccttggatgacatcgtcatgcaagtgatggagatgatcaatgccaacgccaagactcgcgggcgcatcatcgacttcaaggagatccagtatggctacaggcgtgtgaaccccatgtacggggcagagtacattctggacctgctgctcctgtataagaaacacaaagggaagaagatgacggtccctgtgaggcggcacgcgtacctgcagcagaccttcagcaagatgcagtttgtggagcacgaggagctggatgcacaagagctggcagacagaatcaaccaggactctgggtccctgtcattcctgtccaattccctgaagaagctcgttgccttccagcttcctggatccaagacggagcacaaagaacccaaagaaaagaagatcaacattctgatcccgttgtctgggcgcttcgacatgtttgtgaggttcatggggaactttgagaagacgtgtctcattccaaatctgaacgtgaagctggtcattctgcttttcaactctgactctaaccccgacaaggccaaacaggtcgagctgatgcgagattaccgagtcaagtaccctaaggctgacatgcaggtcctgcctgtgtcgggagggttttcaagagcactggccctagaagtaggctcttcccagtttaacaatgagtctttgctcttcttctgtgatgtggacctggtgtttacagcggaatttttacagaggtgccgagccaacacagtgctggggcagcagatctatttcccaatcatctttagccagtatgatccaaagattgtttatagtgggaaggttcccagtgacaaccattttgcctttactcagaaaacaggtttctggagaaactatgggtttggcatcacttgtatttacaagggagatcttgtcagagtgggtggcttcgatgtctccatccaaggctgggggctggaggatgtggacctctttaacaaggttgtccaggcagggttgaagacattcaggagccaggaggttggagttgttcacatccaccaccctgtcgtctgtgaccctaatctggaccccaaacagtataaaatgtgcttggggtcgaaagcatcgacatttgggtccacgcagcagctggccgaaatgtggctagaaaagaatgaccccagttacagcaaaggtggcagccacggctctgccaggacagcctgactccggccccactgcggagaacgttttttaattgcctaatttatttttaaaaagtttttgtataatcagtttttgaagtccatacaaggatatattttccaagtggttttcttacacaggactccttaaagattgagctttttgaacaaaaatgtgatcaatgtttgccttcgaacacaccttgctgaacactatgtagcaccggcttaatcctgacttgaagcatacccgatgaacaaaactttggtataagaatttttttgtttttggtttttacatttcttttccagacaattcccctgtctctgtagtcctaaggcagaaagctggaacattcctaggaagtctcgtcaccgtgatcagagcactgtaaccctggtcgatgctgagactgttaacttgtctctgggaagtgttctgctgtggctgtcacctgtcacctttgcacaaactccacctttttcctttttttttttttttaaactgttttttttttaagccatcttgagttccagtcataaagtaggcaacatgatagtagttgtgttgtcactctctccaagacagctttccaaatttgattattcccccacgtgctccacccaccgagggtcgcgcaggctttcccagcgggaggtggagggaagcacagaggtgctcgccccactgaactcccgtggcctcaacggacctggcactgaagtccaagaaggacttggcattttctctgccccaacccttctttttagagggtgcagtattattaagggggacagagtggctgttagcagtgtaatgagtgcgagctaaacagacaaacctctaatggaagtgtgagggaagctggggctctgctctctgtcctgtgctgtggatggagatggctgcttcattttttaattactgggttttctatcttgttatatgaaatacctttaatttatttaatatacccattgttttagatctctgccattttgagtacttgtcagttactagtatttatgtgcacggtgagtgtggttagaatattttatttgcagtaaactgatctccaaagatttccttttgaaaacactttttcctcatccttaatttttacattcccgtcttactaaagattaagtgttctttgataattttggtgctcatgtgttttggggacaaaggtgaaatgagtctgttgtcacaccagggtgtttgttttcaactcacagatccaatgtgccttaagaattggttttcatttagagttcagacagttgatagagttgccatttttaatatacatcgttggagatctgcttatttgtaaatagcctattgcacactcgaacaaataaac

SEQ ID NO: 583 - protein, 813 aa, Mus musculus
MLLGLVLGFVLASRLVLPRASELKRGSAAEGVPRDRNFLFVGVMTAQKYLQTRAVAAYRTWSKTIPGKVEFFSSEGSDTSIPIPVVPLRGVDDSYPPQKKSFMMLKYMHDHYLDKYEWFMRADDDVYIKGDRLESFLRSLNSSEPLFLGQTGLGTTEEMGKLALEPGENFCMGGPGVILSREVLRRMAPHIGKCLREMYTTHEDVEVGRCVRRFAGVQCVWSYEMQQLFYENYEQNKKGYIRDLHSSKIHRAITLHPNKNPPYQYRLHSYMLSRKIAELRHRTIQLHREIMQQLFYENYEQNKKGYIRDLHSSKIHRAITLHPNKNPPYQYRLHSYMLSRKIAELRHRTIQLHREIVLMSKYSSTEIQKEDLQLGIPPSFMRFQARQREEIWEFLTGKYKATDGQPPRRGMDSAQREALDDIVMQVMEMINANAKTRGRIIDFKEIQYGYRRVNPMYGAEYILDLLLLYKKHKGKKMTVPVRRHAYLQQTFSKMQFVEHEELDAQELADRINQDSGSLSFLSNSLKKLVAFQLPGSKTEHKEPKEKKINILIPLSGRFDMFVRFMGNFEKTCLIPNLNVKLVILLFNSDSNPDKAKQVELMRDYRVKYPKADMQVLPVSGGFSRALEVGSSQFNNESLLFFCDVDLVFTAEFLQRCRANTVLGQQIYFPIIFSQYDPKIVYSGKVPSDNHFAFTQKTGFWRNYGFGITCIYKGDLVRVGGFDVSIQGWGLEDVDLFNKVVQAGLKTFRSQEVGVVHIHHPVVCDPNLDPKQYKMCLGSKASTFGSTQQLAEMWLEKNDPSYSKGGSHGSARTA

SEQ ID NO: 584 - DNA, 95914 bp, Homo sapiens
  misc_feature (1)...(95914): n = A,T,C or G
gtttccctgagtactgtgagcccctctagcaaattcactgaaccaaagaggggttgtgggaaccccagttcatagtcaccaggtccaaaggcccagacttatacgtgcctgagtgtggacaggagccatcttgggcactgagccctcaacctgtatccgacgctatctccaggtagatagtgtcagaattgaattggaggacacctagctgatgttggctgcagaattgattggttgcttcctggtggggaaaacacaacccccaacacgtttgatcacagaagccttctgtgttgattgttatggtgtgaaagcagaggaaaaacacagatgagttggttttttcacacatggtgtcacaggtgtatatgtcaacacttaaattgtacattttacacatgtgcagtttatcgtatatcaattatacgtcaataaaactgttttttaaaaatccttggccaggcacagtggctcacgcctgtaatcccaaaactttgggaggccgaggtgggtggatcacctgaggtcaggagttcgagaccagcctggccaacatggcgaaaccccatttctactaaaggtacaaaaattagctgggcatggtggcgggcgcctgtagtcccagctactcaggaggctgaaacaggagaatcccttgaaccctggaggaggaggttgcagtgagccaagatcgcgccactgcactccagcctgggtgacagagggagactccgtctcaaaaaaaaaaaaaacaaaaaaaaaatcctctctgttcaaataagtggcaaagtttctgtaccctcgtgacacaggtagttctggttcagggtcagagctccctgtgggatcttggagtctctgtgagctttgcttctttgacatcataaaagttgaccaaaagtgaagcagaggtggtttggcctggcatatgtttcaggcaagcatcatgggcagttccagtgccctagctgaagtgacacagcttctcacccttgtttctgatgtttgctgtctcataggtgaagcagttggcctcactactactaaatactttaaaattacgtatacttttcagtggcataaatgttcatttctgagttaacaaatgctaagtggcatacacgttttttttaaccaagtaaaacattgactcaaaaatttcccatctctacaaaacattttgccgggtgtggtggcttacgcctgtaatctcagcactttggaaggctgaggcgggtcgatcacgaggtcaggagttcgagaccagcctggccaatatggtgaaaccccatctctactaaaaatacaaaacttagctaggcgtggtggcgtgtgcccgtagtcccagctgctcgggcggctgaggcagaagaatcgcttgaacccagaaggcagaggttgcagtgagctgagatggcgtcactgcactcaggcctgggtgacagagcgagactccatctcaaaacaaaaacaaaaccccaagtaatccaattaaaaaatggacaaaagatctgaatagacacttctcaaaagaggacatacaaatggccaacaggtatttgaaaaaatactcagcatcactcatcatcagagaattgcaaagcaaaagcacaacgagatatcacttcaacttcaccccagttaacatggcttttatcaaaaagacaaaaaataacagatgctggcaaggaggcagagaaaagagaactcgtacgctgttgtataaattagtacagctattatggagaacagtatggtggttcctttaaaaactacaagtagaactaccctacgatccagcagtcccactgctgggtatatacccaaaagaaaggaaatcaatatatcaaagatatgtcttcaatatcccacacttattgaagcactatttacaacagctaagatatggaatcaaaagtgtccatctatgaagctgggagcagtggctcacgcctgtaatcccagcagtttgggaggccaaggtgggcggatcacttgaggtcaggagtttcaaaccagcctggccaacatggtgaaatccagtctctactaaaaacacaaaaattagccaggtgtagtggtgggtgcctgtaatcccagctactcaggaggctgaggcacgagaatcacttgaacctgggaggcagaggttgcagtgagccgaaattgtgccactgcactccagcctgggtgacagagtgagactctgtctcccccccaaaaaaaaagaaaaagaaaaagaaaaagtgcccatcaatggatgaatggattttaaaatgtggtacatattcacaatggaatattacacagccataaaaagaataaaatcttgtcatttgcaataacataaatggaactactaaggacatgttaagtgaaataagccaggcacagaaagacaaatattgcactcatatgtgagaccatttttctcatggagatagagaatagaacggtgattaccagggattataaagagggaatgattaatgggtacaaaagtagagatagattagaaggaatatgatctagtgttcagtagcacaatagggtgatttagttaataatttattgtgtatttcaaagtaactagaagagtagaattggaatgttcctaacacaaagaaatgatacatgtttgaagtgaccagttaccctgatttgatcattacacattgtaggtttgtatcaaattatcacatgtacccataaatatatatgactattacatatccacaaaaattttcaaaatacagaaaaaaaagtttgcagttttaggagaattgcaaagaaaacagaagtctcaaagaggtcagcagcccctcatggggaggaagaggggctcattccctttgcattggtgttggggggctaatgaaagcccagtgatgtaaacaacctctctgacctttaaccctggcccctcctcccactgccccagattctatgcccaccagcccccatgggacaagatttgccgggctgagggaaggcactctgatgaccttttgcattgtgagcatgtttgatgctgtgggaggcagtgtgcccaagagcaccccagacaactccggattttgtacagccacatagtgcttatttggctcagacttcggcagcaaggacctgcggacaagctgtcctgggtgagctcctctgcagcttgagatacccatgcagatgcaggaagacaaaagcttctcagctagcatctacagccatgcgcagtaacttacgctggctgacagtttgcatctgttgggagataactgacccatttctcacatgaaagcagagactgtggctctcaaaccactctgggtatcagaatcatcttgggtgcttgctaaacctacctacttccctcagagtttagggggagtttccagccgacagcttttaattcaacttctctcatgttacagtgtcaccagctggagaaccacaaatccagaaccagggtatcaccttggaaaatgctggaataggcgataattagaagtaggttattattaaccataaagtaaaatgtctgaccattgttctttaagtccaaggttaaacagaaatcctcacttcgcaggaattagctgtgtaccacaagagggtgccattgtcgcaaagttgtggcactgcccttccagccctttgttatattcaatacgctatccaaggaaattttgaaaattatttttctatgttaaaaggctaaaaaaagacatgacacaaggctctaatattatggaaggtccgagaataaagtacaaggaggaacacatataaaacaagggaaataaggctgggtgccgtggctcacgaacctgtaatcccaacactccaggaggccaaggcaggaagatcacttgaccagcctgggaaacagagcgagaccccatctcaaaaaaaaaaaaaaaaaaaagttaggcctgtagtcctagctacttgggaggctgaggtgagaggttggcttgagcctgggaggtcaaggttgccctgagccaggatgactccattgcactccagcctgggtgacagagaccctgtctttaaaaaaaaatcatggccgggcgcagtggctcacacctgtaatcccagcactttgggaggccaaggcaggtggatcacctcaggtcaggagttcaagaccagcctggccaacatgatgaaaacccgtctctactaaaaatacaaaattaggcgggcatggtggcaggcacctataatcccagctacttgggaggctgaagcaggagaatcacttgaacccaagaggcggaggttacagtgagccaagatcacgcctttgcactccagcctgggcaacaagaacaaaacttagtctaaaaaccacaaaaagggccaggcacggtggctcccgcctgtgatcccagcactttgggaggcaaacatgggcagatcatgaggtcaagagattgaggccattctggccaatatggtgaaaccctgtctctactaaaaatacaaaaattagctgggcgtggtggtgcacatctgtggtcccagctactggggaggctgaggcaggagactcgcttgaactgggaagcggaggttgcagtaaactgagatcgcgccactgcactccagtctggagacagagcgagactctgtctcaaagaaaaaagaatatgtgatatatacataaatatatatatatatatatcacatatactatatatatatataaattatatatatatatacacatcagtgatatcaatgatatttatcagtgcccaattgggaaatcttgcccacacacttcaactgccctcattttctccaccccccattaggccatcacttttatttcttgtgcatccctctagtgttttgttataaaaacactagcaaacttcttattctttctgctttctgttttgtgccatttcagtagagagagcgcctccttgctgtggtttacagctgcacaatagttcattctctgatgggtgcgcctttgtgtatttatccattcccctatacatgaacactggggtctgatcttttactatcacaaacagtgtcgcagagaataacctcgttcaagtgtcattttgtactggtatggctggaggacaaatctcagaagcaggactgtggggtcgaaagcaaatgcacttgtaatgtgtaatgttgacagtgagccacgatcactccaccgcactccagcctgggtgacaaagtgagaccctgtctttaaaaaaatggaaataaaaattcacacttatattcaaacaaaaccgccctcccagtgggtttgtatgactttgctctcccgcaagcatgttgggaaagcctctatttccacagactcctccgagtgaatatacatacggtgattattttgagttcctagagaggccttaattgccaactttggataacaacatttatcacccatgaggtgtgcattaagagtgtttatgaccctagcatgggcttgatagcataactgggtgtgagaaggatcaatgacctggggccatttagccatgagtattatggtgacagtgttttctcttgcattgtactttcaggtgtttgtagatccctatttctgctgcctcaatttgtagcttaaaccgtcttctgcagcgtgaatgtttttcccagttttacgtttcattaggcctccagtgggaatcgaatctgagctgcacatctggccccagctgcactgagccctcaggtggccatgctgctgcccagctgtccagtgcctgggttcctacagggagttccctcctgtggataggagctttgtctttgtgcaaacttcccagctgtggaaactctggcaccgctttaaagatcaatgcatttcttggcaagggatgggaaaggcaaactcctctccacaaggattaagtcttacaccagaagccaactgtcctcagcctctgcagtgaggttgtctcctaaagaacattcaggctggttcccagtagtgcctgtgctggcggcacccagcgttttctagttaggaagatcacatcccatctggctggtccacatggttatactgaacttaaatctcttttgtgtctctatcgtacacatgaaagctcacacacacacacacacacacacacacacacacacacagtgtgagaagcactcacactgactcagcgtctgatggaaacggtgtacacagctgataagcactgaaggactttgcagaacacccagggctggaataggccagtgtgtgaaaccagaacgtgagccctgctcacttgccctttcctgcatctgactggaaatgctacaaacagaaggaaatagtgagcgaaattaacaacctcatgaggatcttgcttgtaagtttaatagcagcattcataatgaagcagtgttttattgggttaacagaggttaagtggcaatattagtaaagtggtcattatagattttcttctttgcaggcagtgaacagaaccttctgaaaggatggatgattataactcctcagcattcactgtttcttaaaacaggcctttctgaaagttttttttctttaataaaaattaccactttttccaaggacccctgtttgaggcgtgagtggagaggcttcatctttaaagaagctctaacagggaactctgtcggtcgtttgaggcttgctgccaacaaacaattgaggtatttaccaagggtttccaagaaattgctgcaaattatatgaaatgttatactggtaacagacgttcaatgtattagcaacagaaaagaaatgtgaagtgtgtgggaacaaagttgccatctgtgagaaaatgctcagtaaggtaggtggcgatgaactttaataatgtgtcataaagagtcacactcatgaacacagaagggaagttaagtgatctgggatttttgaacacatttctgaatactggtctggaatcactatggaggaccgtttaacgtgatccagcagaaagactcatttggagacagagccggactcccggagcccctccaggtggaactcactccacgcagagctcagactcggtcccacactcctgatccctgatccatcacagcccacctcttgggccactcctgtgccattgggactttcatggaataactacagttaagggcttccttacaagtgttcctggtaacagttaatacctccccttcttttatgatgagaaaaatggtcaatgattccctcaacagagaaggccagtagcacagtgaaatcaagaagcccggaacatgaaaagtctttcctcagctccctgcagtgaaatccctataaatgcgaatcaccctgcctactccttacctttaaaaattacttagggtgagggggctttaggatgaggacagccttggcctccagggggctgtggggaaggacgcatgtgtgtgcattgggggcagatgttccagaccctcgttgtcctccctggctccttgctggtattgactagtggggctgggcatgggacaggccttcatactgggggtaccagtcctgtccagctgtttgggtctctggctgtcactgaagttcttgattccaggtatttgctactggctgtgaaatccccacttaggatagccttgtctcctgagccaggccccttactgggacacttttggattcttccccaggagaactgcctcagctcaacaatccagctgctccttccagatgtgctagagcttgccctcctgctcctaggctgcatgccggaattggtccctgcccctggcagacttctacaggacctcagtttctctcttctccttccaaccctctcttggcctggcatatccctcttctcccagagggagttcccgtatgtcttactctccttctccagggaattgtaagccctcaggctcagcctttacaaagaaaagggtatcctttctacattacgaaagacccccattaagcctgcaggtgagacaggtgagactgttaacctaggaactgagggacaactaggaaccaggatattgaggaggacaaaatatttggcatcctcagaatattattcccatcagatatttatatactttttttttttttttccttgagacggagtttcgctgttgtcgcccaggctgcagtgcaatgcaatggcacgatctcggctcacagcaacctccacctcccgggttcaagcgattctcctgcctcagcctcccgagtagctgggattacaggcatgcaccaccacccccggctaattttgtatttttagtagagtcggggtttctccatgttggtcaggttggtctcgaactcctgacctcaggcgatccgcccgcctcagcctcccagagtgctgggtttacaggcgtgagccaccgcgcccggccagcttttcactggacactagtttcgaagaaaactaggtaagtctaaagcaggttagaaaatactgaaatcgttgaatatgctacaaaattgaacatctgaatctggccagattcgtacttcatgtaaatcactgtgaatgatggggctgctgaatttgggggatctggtgactcctcggcatttgtggtttatggtcttagtggaaacctttttcgatggttttcgagcctgtaattcatggttgtatgttctgtatttttcccaagaccactgctggaatcctgtattcactgcataatgagtattttatttttagatgtggatcaccccttagggaggggctctgtgggaaggtaggtaatgaactatttttaatataaatcacaagtgtcaaagaaagtggtaatatccaaagaataaacaagagtgaccaccattcaggtgccgagaaggtatctgaagctcccacaggcattttaaactgtgtgatagtatttcaaccatttggtcaacaatgaagaaagatccaaggattgccccaggcatgtgtttatttgattcaatgcaggtaacttctcaggcccagggaaacactttgcccttcaaaagtttcattagaaaaccccaatatactggtgactaagtaacaagactgaaactctacacaaactttcgttgtatggagacctccgcttttgctgccttagctgaagtattgcagaggaaatgtataaaacttaaaatccagagtagaggatctgggacccaaaatccgtctttagaaatccacggcacttttacagacggactatattaaagtagggacaaagtcccaggctgggggtactagccggctatctgcccacacagtatgtaaatgaaagtagggtttaccatccagggcattaacttcattttccttgtcttcgagatccattaaatgctagtactgtatgagaagcgtggaccttaagtattaaagatggctttttcttcttcttcttcttatttagcgtagaaactagcaacagggaacaaggtaactgaattcacggtccactcgcaggcgcgcacgtccccagggctccgggacggctgttccctgcgtgcggccgcgggactgcggacaaagctgcagtgtggtcgggagcgcggggccgggagcgcggggccggcccggcggcaggaagggcgtggccgtggggtgcagcgaggacggcccgtgcgggaggaacgtgcgcagcgtggagtctgggggccgagaagcccccactgcaaggctggctcccgagattcgcgcccgggcgccgcggtgcgggaagcggccgtcctcgcggggacgcccttgcgccgggtgctaggtgcggatcacgggcagctccggccccgcgggcgccgggcgggggcccacgccccctccgcccgccagctccagtcgcagaccgcgcgggcggggcgcccgagagggctttttttttttttggtcaaacttcggccacgtgaaccgcccctcattcacttttgcgccaatcgcgcggcgcggacggatcccgagaggggccacggctcgccgccggcggggccacttcataacgcgccgtgcgtgacgtgaggggctcctgttgcaatggcgagctaagccggaggatgtgcagctgcggcggcggcgccggctacgaagaggacggggacaggcgccgtgcgaaccgagcccagccagccggaggacgcgggcagggcgggacgggagcccggactcgtctgccgccgccgtcgtcgccgtcgtgccggccccgcgtccccgcgcgcgagcgggaggagccgccgccacctcgcgcccgagccgccgctagcgcgcgccgggcatggtcccctcttaaaggcgcaggccgcggcggcgggggcgggcgtgcggaacaaagcgccggcgcggggcctgcgggcggctcgggggccgcgatgggcgcggcgggcccgcggcggcggcggcgctgcccgggccgggcctcgcggcgctagggcgggctggcctccgcgggcgggggcagcgggctgagggcgcgcggagcctgcggcggcggcccggcgggcggagcggcgcgggcatggccgcgcgcggccggcgcgcctggctcagcgtgctgctcgggctcgtcctgggcttcgtgctggcctcgcggctcgtcctgccccgggcttccgagctgaagcgagcgggcccacggcgccgcgccagccccgagggctgccggtccgggcaggcggcggcttcccaggccggcggggcgcgcggcgatgcgcgcggggcgcagctctggccgcccggctcggacccagatggcggcccgcgcgacaggaactttctcttcgtgggagtcatgaccgcccagaaatacctgcagactcgggccgtggccgcctacaggtgagcccctgctccccgggcaccgcctcctgcgtccggcatcccggcggccggcatcccgggtgctctcctggctctcgcctccgcccgcttcctaggcccttcttgggcttccggcgggatcgggttgcctctcgggagacgccgggccgagggagaaaagatcagaggcgggatggtgagcgcggcgctcaggaacatggcctttggggtcagatggactagtgtggcctcgctgggtgtacctctcaccctgatgaaggcactttagcctttgcaaatcgaagcttctcgttagaagggcccgacagatcgggtctccctcataatgttggaaaactcatagcacagtacctgatagtggaggcagttggggctgatactggattccctaaaatgtgcacctttgtccttgcaaagctggagcccgtgtacgttaatctagttctagaacctttccacatcatactctcacatttcgcagttggaggcactcctataaatgaaagagaatgcccgcagcatattggaccacaccagtctgttgagtacagagagagagaaccttggggaaaagcagttcttggcccttggtagattcagtggaaaactgcattctggtgttaattagttcagcttggtggtgtatgcatgttatccagtaactgggctctagttggccaaatgagtcataaaagcagctggaattgtgttcaggtttaacaaagggattagccaatgtagtctctagaagggagatgattttggaatggctggcatggttagaatcagatttgtattggagtgaatttgaagttggagagggttgtagactcgataaagggatttgatggaaaccctatatgtgtgaagtatagagacacttactgtatggataaagtttgggtcttatccagccacagagcaaaccaatgtggggaatggttttagagcatcagttgtctggtaatgaaatttcagagcagccagtgctgagccaggctaagctggttgctgtttgttcttataaccaatacctttacacttcagtttttaaatgcagtcttggtcagatttttcaggcactagatgttgtgaggggaaaagcatatatggtctcccttgcctttaagggagaaagtaaaggactgagaaagaaggtgaaagtggtcttcagtgactgccccttgaatggcttgatccccattcctgcacatttccattagggtcctgcttaagtccagaacccacattccgccaggaagggtcctgagtggcttgaaaagcttagaatgcaggtattgtaaatacagactaatgcaggcggggcgccgtggctcacgcctgtaattctagcactttgggaggccgaggcgggcggatcgcctgaggtcaggagttcgacaccagcctgaccaatatggtgaaaccccgtctctactcaagagtacaaaaattagccgggtgtggtggcgtgcacctgtagtcccagccactcaggaggctgaggcaggagaatcgcttgaacccaggaggcggaggttgcaatgagccaagatcatgccactgcactccagcctgggctacagagtgagactccatctcaaaaaaaaaaaaaaaaaaaaattctatctatcgatcgatagatagagatacatagactagtgcagtgatttgggaaccagcctatcaggatctctcccagatctaccttgcattacctgaggttttatgggattttttttttttttttgaccagagaaacagccgtatcggaaatcgaggatgagccatatagattatttacagcatggttttgaaagtaaatccgcatgactctagtgtggtgatagaccatgtgaaatcacagttttggggacagttaacaaaccagttagtacaaacagtaaattaggtaactcccttatctcccccatgccccctgaaccaaatacattttcatggttacggtatcaatatattcaaatcagtggggggcctaatgcaccagcaatactcagaaaatgtaatgcaggccgggcgcggtggctcacgcctgtcatcccagcactttgggaggccgaggcgggcggatcatgaggtcaggagatcaagaccatcctggctaacacggtgaaaccccatctctactgaaaatgcaaaaaaaaaaaaaaaaaaaaaaattagccaggcttggtggcaggtgcctgtagtcccagctactcgggaggctgaggcaggagaatggcgtaaacccaggaggcagaggttgctgtgacccgagattgcgtcactgcgctccatcctggggggcagagcaagactccgtctcaaaaaaaagaaaataagtaaaagaaaatgtaatgcaaactagaactactgtttcacacttggagatggttttccaaactcgagcttaacgctcttacttttggcctcctttccacatctcttccctcatctttttctggatgtaagacttaatctcattgtttatttattatttttttttcaggtggttaggggaaagcagaaacacagtttgcccccaggcggggttctccctttcttttgacacctctgcctttctgagaaaggaaaacgcctaccaggagatagtgtccagctaatgtcactccagctctctcacagaagtttccttttatctctcagatcttaagaagtcagagtgcatggagcctggaggtggacctgccctgccagttagggtcctttgcctcttgcctgccaaccctgtgtttagactgactgcaggagttggcacaagacgattttagccttaaggctaaaagttaaggaacttttggggagggcctcaattgggatggaggttatagggtataacatatgattccagttttactgtgctttgcagcccagaccaaaagtccacactgagctcttaaattggaaattccatgcacagttcagtataaaagtaagcttgactcttctagcacaaggtagaactctagtttggaaatcgatgtgctgagctttacatttctcctgaaaggtaaattcattcttcatcttatcgaaaactgtagttttgttttttaaaaaaaacaaaaaaacaactgttgtttggcttatagatgaaggagatgccagcactttcagtaagatgatactttggtgtagaatactgaaaatgtcagaatttaggtgaagggactagtagctagcaacctcttcattccaacaactctgagatccagaaaggggctaaaaaagcttttgaaaatccaaggagatatgcccgtccacactaaaggcacagcactttgatgatagaacatctccatcattacacatttttactttctagacctgccatctgcttgagggatggatgggggccaccaagatatagcagggcagtgacagctgatagcagacaagaaacagatttttcaaagcaggcgagacaaaactcaaaatgtagcaggtgagagaccagccagggctgagctttggaggccctgagtgacacagtagctgtggagttaataggagtgatcctgattcgttacttaggatccatttctttgtaaagcacatgcatgcatggcccctctggcccccgaccctgagtcctgggggacactgcagtacacggcttgctgtcatgttctttagtcagagggacgacactaaaaagagggtttctgctagtgatggatgctgtagagaaaatagaacagggttggggcagggcaagtgtgtcctctctgtgttaggtgattagggaagagtttggagagagtgccatttgggctgagatttgatcatgaagagccagttgtgtgaatatcattgatgagcatgagggccaaggaagcaccgggaagtcccaaggcagggaccggcttggaaaggaacaccaagaaggccagtaaaagaaagaaagccaagaaggccagtaaaagaagagccccaagaaggggctcgctagtgtccagtcttgtaaagtttcattctgagtgaattagaaagccactggagggtttatgcaggaaaaggaggtgggtagctggggttctgtaagttaacacataaaataatttattttgactcatctgcaagtgtgtgttctaggtaatttcgctttaaaatggtactgtgattcctctgaagtcatttattatgcaaattaaggacagcttgtcagaacctctgggtttcttgtgtcttgcattactagctgcaattcgtatttttcccatatttaaacattttctttttagttatgttctgtgatatatggaagggaaatgttcatgtagttcagtctatgtctttccctttctgattttagttttctctaccccaggttcacagttactgccctggagagatttttaaaggtaacgtttccttcctaattctagaaagggtagaaatcatctcaactttattttttccccaaatagtatgtggtcgcagcaccatgtaccgttgactaagttctcatttccctaccagtttgaaatgccatcttcgtcatgctcagaattcttgggtatgtttctggacttcatgttttgttccgttgaactttctgtctgttcttgtgccagtaccacccattgaaattattggaggttgaataatattttaatatccggtggacaagttcccctttgttattcatctgcttcaaacatttcttggctacacttaccttttcttgctgagagagtttctgtgctatttagatttttttaatcaacgttttgataaaaaaaaaaaaaagccacacgtattttgcttattcgtccatttttatgcccagaaccttgagctaatccaacaccttttgtttgttttggttcttaccctctctgggctgaagatggggaatagttttgttctttttttatgttgtcagaagaaagaggtggatggtttcccttctttgcgccaagattgaacaagggcaccattacagattagcatcagtctgtaggggactgtgggaagaaagtttgagaagcattacctagagatataggaatctgatttcaggatactattatcagtgaatgatctcttcctaatgccttaaatgaagacggactgttcctctaccaaccttaatgagatcctcctatcttataaatctgaattcatttccttatttcttgagctaagtaaaccatgtttatcttgaaacagttcagagcagtcctcactttcttagatagaattcaacttggcaaacatttatacagaaggcttttccatgtaaaatccaaataatcaacctgtaagtgaacttttggagcaccaagtcatttcagatcgtgaatttcctgtaggagactagggaaccatgtggctctgaaaatgagtgtagttttttatgtcaggttcaagatcttgaagcgctcaaacaatattccagggatttccagggatggctgtggctgtcaatagcggattgattccagggatagatgtggctgtcaatagcggattgtgcgtgactgtttccattgcaccggcagcttcacgttcccctgtctgttaactaagctgctctttattaacagtagattccaaatacagggccctagtctctgcagagttcattgtctcagaaggaaacgagcgatggtattggttgatgagggctgtcagggtgcgtgaactaatcactgtgggggagcagaagaaagaggcttacacccagtgggtgatggatcaagaaatgtctcacccacactcccaccctttttttacccactagctgagtcttggaagatgaagaggtgtttttgaggcagagacaactacaggtttcctacaacatgaaatggcaggagttagtgaaggagcgatgggaaaggccagctctttggggctaggtgtaggctgtgggtggtagagtggtgggcagggacatggaagggaaggtctgcgtgccaggctttgtgtggttgctgtccagagctattggtgacatttcggcaggacagtagcctgatgggatgtgtgttttggaagatcagcccagcggtgttgctgctgcagagggtggctagagttggtcaagtaccggtacctagctagagctggacaggaccggtacctgttgagggacgcttgggtagcatttatcaagaagtctaaaatgcagctctcttgaggtctggcaattgctctagaattttttccaaaggaattttaaaggtgtgcttaaatgtgtacatatgaagtggaaatttcaggtattttaggtgtcctgctttaggagataaggaccaaaattgacttaactgattcatccatactgtggtctgcatctctaacaagtaaaaatggtgtggctgaaatacttttattgacatgaggagaggttcagaatatacttaagtgaaagtaaactgtaaaacagtatggccagtacaaagcccttctgtgtttaaagtaaaacaaaagtgtatgtttgtgtagcatagaaaaggaaacatcaaaggatgtactcactgtgatgccaagtgatcttttatattcttcttagctcttttctatatattctggtttttctacagtaagcagttattttgtaataaagctacagtaaaaccacaaaaagatgtcagctctaagagaaactgcattccattttgagcacgttaggctgctggtgtggaggtccgctaggcacagagctgcagcccgttctcgtttcagtcagttaccattaattctgtcctgaagtgacagaattagcttagcacacatttacttggttagtgtcacaaccgttttcctcagttactgtaacttcacgcttccaggtgacattggggaggatctggtggcagcattttcagtgcaggggcctcagcttttgtatcttaatgtaaatactcagtgcttccacctgttgttgaggcctttttggcttctggttccggatggcattgggtgaacaagaaaacctagctacagtttacaagcataaaagctgtccatcttctcacctgaattcagtgtcatctctgaagcatttatagctgcagcattttttctgtagacaaatacattttctggatgattacaaataaggtccagtctgctctgatgtggtgtcaagttgatgcctgtaaaccaaaagcctgaggattattgactgtaggtgttgaggccattgaaattgtggttttctaggtggaccataggcgcaaagactgttacactttgctcggcgtgtttggtaactgatggcagtgtctgcaggtaattgggcacaatttagaggcgcacacggatccagacacagaatgtggcctcagaagctaacactggaatcaagttgtctggccttcagttaaatccagcccaagcactgcaaagttgtccttgaccggcaggttttgtccaggttttcaagtcgccaagccatgcatgctgggagtgggtctgaaagtggttgaagtgtgtgtaaggctggtctccttatccacgatgactgtttgttcagccttagcagtgtccgtgagcctggaaaagtgatgtgggtgaccacctgggaggcgcgtgtgtgggatggaaagccagtgtggaggctgtggggccagggtggctggtgactgtgtttaggtgggctttatagaggacggtgcctcagttcagggagacggtgatttgcaaagtggtcggccagaacaagttcagggtggtttaattgtttgcattaaacgatactgatttttggttcatgtggatcattaagtattagtcgcatatttatacttttaaggatacagcagcgatatgcaaattatgaaaggagctctccaacactttcaagctttggaaatgtctcatgagatcagaattcgtcttctgtcatttacactccaaattttaattgtgatgtttcaaaagtggcctatttgtggtctctgttcccattgtttgccgtgaacctgggctcaaagggcgggctcctcgtagctcttaataccttggaatgccgtctgggcttgtgcccaggccattgttgaagtgggaggctgtaatcccccctgccaacagcttaattaagaaaaaaaagggctctttactgcttgctttcccctcaagtctattttttaggatggacagtaaggagtataatttggtttttcttttaaaataattttcccaccattcacagcctctgttacattttcccacctcctttcaaaaagggtttgagattggacaggtcataaggacgtgcacgatgagacagttaaaggttttgaaagaggaaaccacatacccggaaaccacatgcacagaagtgggaaactgcagctgaatgcatttgctgcagagcttttgggaccaaggcagaagatggagatgagggattgaacagtgtttgcaacatcctgccagaggggattccttccggccgaggagaggcccgtggcatcacttggtggccttgaaagacccctcccttttctgaaggctgtggctctggctggcagcatagagtggtgccctccgtgtactctcttggaggatgaacttggactgctgctccatcacactgtacttcctgtaaggatacctccatcattgaccttgggagaagtttccctcaggccttagtatgtttttacacttaaccctgaacagtaggacacagtctcgtgacttctcatggctgcctgctgaaaagtttgtagctgaatttgggcccaccactagcacatccgtaggtcacgtgatggcaggtaggtctcagcacaagagcactttgcagttgaagtggtggctcctgagagtgctctcactgagtcagggtttgccctgggcagggcagcctccaccaggatttgcctttcgttccttgcgtaagggtttcctactcttacttttctttggtctcattttcttgctgatttttctcatcctgtatgattttggttaagttgtcttaaatcccttctgtaacaggggagaatgtaaatacagctggccctgctatctgctacatctgtggattccaccatccatggattgaaaatatttggggggaaaaacaatagaaaataacaataataaaaacaatacaagtaaatacaatatagtataacgactatttacatagcatttacattgtattaggtattatgagtaatctagagactatttaaagtatacaggagggtatgtgaaggtttaagcaaatactgcaccattttatatcagggactaaagcgtctgtggattttggggtcctgggatcattccctcttggatgataaggaacagctgtatatacccttaattcctattatccatcagttctacagagagaaaaacccatatcctcccttctttaacttccaagatgattttatcatgagtccttttaaactgactgccgtgtagccatcagacagcacatgtaatagtgattttggggaactcacagaaaatctccccacctttttaatggtaactagtagaataactattaaagcttaaaaatcacaattgaaacgactcaatcttactccatttttctttcagtttttcttgttggataaaaaaattttattacaaaagtaaaaattctctgttgttacatgttttgatttctttggttgcttgttagcctcaaagcttttgcccagttaaaactttttttccagctctaaatatacctgttgcagaaaacttagaaaatttagaaaacacaaggaagactattggccgggcgcaatggcttccgccggtaatcccagccctttgggaggccgaggtgggcggatcacaaggtcaggagttcgagaccagcctgaccaacatggtgaaaccctgtctcaactataagtacaaaaattagctgggcgtggtggcaggtgcctgtaatcccagctactcgggaggctgaggcaggagaatcgtttgaacctgggagacggaggttgcagtgaaatcacgctgttgcactccagcctgggcgacagggccagactccgtctcagaaaacaaaaaaaaagactattaaatcctttctggttttcccatccaaaaataaccacggtgaatactttgggggtggagttgtacgttattttatttttgtatatgtacttttgttcccttggtaagccacatcacaagtatatactgttgcctgctttttaagcttacccgtatattatgaatatttacctaggacaagagtcatgctatagatgcagttttgtacagaagtgtattttatgtagtttttcttaaaacaacactgaatggaaatggagactatgatattaacccatttatgcctagagttccattattggaacgctaagcttgtgggagttatttatatcccgctcaaggttatcaccaaagtctgattttttttccacacaaaaaaatcgcaacctctgacataaatgggttaagtcctaaccagcaaaggcattccttagctaagctaatactggtccagctgaattacttaactgtgatttgactcagtgtaggaatagcgtttagaaacctagagtgatggaggattcacttggcactctcaagtttcagctgtcttatctgggcttgagcaagggttggacatcagttcattgaaaatgagctttttctggcaaggcctctgcaaacgttttgtcatttcaattaagtgagagttctttgctcccggtaacaaatgtgttgatggcaaagctgacgtttgcttatgaaaatgaaggaactggacttgttgatattgcagaagaggggacagcttgcttctttgggagcattcccttcaattatttgaaattattaatgcatcccctcctcctcctcaggatggtggtgaatcacgatttatgttcctgaactcgttcactttgtggagctcttcaagttaaaggaccctaattgaaaagattataatttcttaagattggagggtttacaaagacttgacattgagagatttccctcaaaccaaccaccagtcatttagaacagaaaaggacaacatgaggtttttccctgagttacctaaaaaggaacagataataattgggtggagttaccataaaactgtagggttgaggttagactgtttttaaaattaattggtttctcttcttgggcaaattacaccatttcagtcatagttgagacattaattgcgtctgtgctggttgtactgctggggcctctttcactgtgttcttcctggtggggtacacgggaagcagggccaaactataatgaagcttcatcctcagtctagtagggaagtttctcgtgctctaccgcgaaatgctcgtgaaatttgcagttaggcctctttcctgtaacattgtctgaagttgatagtaaaagaggatttcagtacatagcttgaggctcaggttttaagaagcattttccacattacctttgctccgtgtgctcctgagactgactagtccacgtggagcccacactttcctgttctttcactaccttatttgatttgcaaactcttgtcttccttaataataagtcatacttacatagtgccaggcaggcttctaagctgtttacagagagctcatttaaccctcacaacaacccccgtttacagataaggaaactgaggcacagagtaacttgtcccaagtggagctggagttctcgcccccatggcctgattccagagccagctcttgcggtgatgctgtagattcgcctccttagttggttgttctttgaaggcaggaattgtctcgcccaccccatctcccaaataacattacagtgttttagtattttcatggcttcctaggttgaaaatttctcaaagtacaagatagaaatgatttctgaccttttgcaaacacgtgtggcaccattaagttacttattgtacatgagtgggcagtattcagtgcacacatttagtgacctctattatgtgccaagcactgaaattatttacattttcaaagaattgttgcgactgccaaatgaaaaacatttctctataaagagagcattatcaggggctcctcgacttgaatggggggtcattgcactataattttgtccttactaacttcccaaggctggaggagttctgagaagttatctcccctccatatgtcaccgcatcagaagactctgtatagcttgtcacacattcacacattgtcgcatttgcaaaaggacttgtccctttgtaggtgggattggtttttctttaaattaatttccacatctctacgtttattctacatcctttttcttcaggagcatatcctttgtgaaaatgaagtgcagtacctagaacagtatctgttaataaccgtggaatgaatgtctgggctgaatttgttttttgttgttattcttgttctttgttaatgagttatttaagtggcgtaagaatacaggtccattttaaatccataggcactaagggaaaacattaacaacaccatcttatatccattctgtgattttgacatctcagaaattaggatgcattttatagttaccggcgtcatgggattatgattggcagtattttttaaatttgttgatagataaaacaatggtgcatcttccagttaacatcctaaatgtgatgaaaaaatgtatatatttaatccttgcactttttgagaggcgtgttggcagaaagtcgaattccattgaattttgcctctacttgaaagagatacattcgaagttgttttgtattcctcatatttgggtttggaagagaaataaaagccagtcatttgttttccaagtgcttcattgtaagttctttttaaaattacaaaagtaaatatttagaatctcagttttgcaagatgaaaaaagttctggaaatggatggtgccgatggtttcacaacactgaatgctgctgaactttacatttagaaatggttaagatggtaagttttatgttatgtatattttatcacaattttttttaaaaaaaacaatatgatacttatgcagttgtccttcaatatagagatgcatagaataaaaagtgaaagtcacctttgtccacacacattccagctcctcccaattttcctccttgtgtacctcttccgcagagatttggtgtgtatcttttcagatatttctctcctaagactttcccttaaagatgtgtgggggtttcattgatccttcaagtaatttttcactataataaatacacttgtaacaggtaaaataaaaaatatttgaaagaacatcatttgataactgctttttttattttaagattaaatttactattttatttattctccacgatacatttttcttggaagtagtctgtatgaatgaattattatagccaaacaactttagatctgaatacagaacgtgaagaaagtaggagggaaagtgcgatatgatagccttcaattagctgctcagcagaagcagcctttacgtggtttcctcgcagttgaccactcatcttccctctgtcgatgggcaaccgttgtctcttacaccctttacgtggtttcctcgcagttgaccactcatcttccctctgtcgacgggcaaccgttgtctcttaaaccctttatgtggtttcctcgcaattgaccactcatcttccctctgttgatgggcaaccgttgtctcttaaacccgggtctgggctgctgcagtagtttactcagtggtcttcctgtgtccactctggcttccttcggccttcttctccattcctagggagttcaaaatgtgtgggccttaatcttgtcttctgccgcattccctctagaggcttcctgtggctcttgcaacatagaggcctgcatctctagtgtactctgccaggccttgcacatttgcctctgttttttttttttttttttttttttttagatggagtcttgctcttttgtccaggctggagtgcagtggtgcgatctcggctcattgcaacctctgcctcccgggttcaagcaattcttctgcctcagcctcctgagtagctgggattacaggcacacgccaccatgcctggctaaattttgtatttttttttttagtagagatggggtttcaccatgttggccaggctggtcttgaactcctgaccttgtgatctgcctgcctcggcctcctaaagtgctgggattacaggcatgagccactgcccccggccacatttgcctctatattagtctgttctcacactgctgataaagacataccaaaataggtaatttataaagaaacagaggggtttttaaaattattttatttatttatttttttgagacagagtcttgctctgtctcccaggctggagtgcagtggcacgatctcggctcgctgcaagcttcgccttccgggttcatgccattctcccgccttagcctcgctagtagctgggactacaggcgcccgccagcacgcacggctaattttgtttttgtatttttagtagagacggggtttcaccgtgttagacaggatggtctcaatctcctgacctcatgatccgcccgcctcggcctcccaaagtacagggattacaggcttgagccaccatgcccggcccagaaacagaggtttaatggactcacagttccacatagctggggaggcctcacaatcatggtggaaagtgaaaggcacgtcttacttggtggcagacaagagagaatgagagccaagcaaaaagggaaaccccttgtaaaactatgagatctcatgagactcactcctgaccatgagaacagtgtgggggaagctgcccccgtgatccacttaccttcccctgggtccctcccgcaacatgtgggaactgtgggagctatcattcaagatgagatttgggtggggacacagccaaaccgtatcagccttcttcctcgcctcatgacagcgctctcgtgccctgcattccttgatgtttaccctgtttcaggggaaggctccctgttctgttggttcagctcatgtcctgtgctctgccctttgggagtacttctcttagttcataataatatatacattagtctcattattctggtaagtgtctgtctctcctgatgtcctctctgtgagttggggatcacgtttttgttcaccaccacatccctttagcttagcacatacttggcacttggttcaaagaaaattttttgagtgaaccatttgattttgttttttgttttatagagttgagaagttcttaggtagggagttgatagtatcacaaaattaatctgtatacccagaccttggtcccctggcagtttggttttcagccataactaaaacttagttatcccagaacagttttaacacttcttcattttttgttggggttcttttgaaagttaatttagactttgcaatacgcggtaacctgggctttcgttaagaggaaccaagcaggccaagtagctttttatcattccattgaacacggcgatacaagatgagcagataacgtgaattcctgaaaatcagcttggaataaactgttctctaactgatatttattttaattccagaacatggtccaagacaattcctgggaaagttcagttcttctcaagtgagggttctgacacatctgtaccaattccagtagtgccactacggggtgtggacgactcctacccgccccagaagaagtccttcatgatgctcaagtacatgcacgaccactacttggacaagtatgaatggtttatgagagcagatgatgacgtgtacatcaaaggagaccgtctggagaacttcctgaggagtttgaacagcagcgagcccctctttcttgggcagacaggcctgggcaccacggaagaaatgggaaaactggccctggagcctggtgagaacttctgcatgggggggcctggcgtgatcatgagccgggaggtgcttcggagaatggtgccgcacattggcaagtgtctccgggagatgtacaccacccatgaggacgtggaggtgggaaggtgtgtccggaggtttgcaggggtgcagtgtgtctggtcttatgaggtaagaacagaattctttaccatgggaaaaacttaattttgtcaattttgtcattagttctgagcgtatcataggaaactagagatgatatcctctttgagggttgaagttggtattattctacatttttagccttagattaaaaaaaaaattcagttcccctttattaccttttcttggctttgagcgcatatcttctgtactttttctccccccagagagagtcttgctctgtctcccaggctggagtgcagtggcgccatctcggctcactttaacctccgcctcctgggttcaagcaattctcctgcctcagcctcccgagtagctaggattataggcaggcgccaccacgctaggctaatttctgtattcttagtagagacgaggtttcaccatgctggccaggctggtctcgaactcttgaccttgtgatctgcctgcctcagcctcccaaaatgctgggattacaggcgtgagccacggcgcccggctcttccatacttttgtcctaatacttagttaataaataatggcatttggggcctaaagaaaagataatgggttgctgatggtcatggtgatattttcttgattatccagaaaatcatcttgtctgacttctgctgattccacagatgtaattgcaagaatgtaggatatctccctatttgtttttgcaaaggcctggctcttctcttctggtcataatgacctacacagattagaaacttaacgtgttttgaatttataaaaggaatcatggtataaaaaagccaatagcatttgacttcgcatttgttgtgtaccttgactgttcagatagttactttaatctgtgagtttataatatagttgttgctttcagaatagttgtcgtgcaacttctgagttaccgtgacacataaatgaaatttgccgaaggaagtccgcttgtagatgttttctctgtagcagttgtagagaagatggactggctttggactttcctgtgttgttgctgcaccctttgcctgcagattgcacaatctgataccagttaatggtgaaaaaaattattgaggttgtattgtctttaggttgataaactcctggcagttgtgaggagcagaggtaattgctagatcttttgcccaagaaaaagaatacactttctaatatgaactgttagcttttttctgaactaatgttctaaagcacgtacttgagtgaaagagcagtattcttgcctgtacttgtccacccctagacttgcttttaaatgtctgctaatcactcttactttttttgttgtttgaactttagggaagtggacattttcaagcatacagggagtggccatgtaatttttaattacaaagtcacaaagatacattttaaatcctaaatgtgatcttgagtgaactcttcaatccctgtgtgccttatactatccccccaaccccagcacataggggacagctcactgggcctacgggatctctctgtcgtcacggatttttgcagcgaggaaagctgtttgagggtttcacgctgttttaagcagaatacagctggcaatatttctgcatttttccccatcctaagaaagtagttataaccttgacacatttcattatggttaaaataggtaacacattgtatattttggaacactttcccctgaccatcatctccgagaagccaaccttcttgccggaatcatagaggacagaccttctttcgggagagaatttttaaaagtatgtcttagttaggtcgtgctgttatatactgctggacagacaccaacagagccagtctcttgagtttgatcaagaacttgggtttagcgttagtgccaagaggtagttagaaagtgtcatcctggggctgcagggtgggaggccattttggagatgattttcctctgacgggaggtaatcacaaaaggtttctgatggcctgcgaaggggtgcatggaatgatcctgtctggacacttggagccccctctgaggcttggtgcatcctgtcagtggcctcatcagctgaagggacctggttggtgaggaggcctcctccccgtgtggtcccgtctccctgccttgggaggtgggtcagggacagcagcagcaaggctctccttgggagtgtggttattgggcctgctgctgctctgcgtttctttaaatgccctgtggtgtcagagctttgactgactgctgcaggcttctcctgggcttgtgccacagggccctcccacctgcagtgcccagagctctctttttctcttctgtgagctgccttgcctgttcgtagtcttggcccgtatttctgctgaaatgttgtcttacagttttgttgaagtgctttattctggatagagtatcttttctcagactgtgacttaacttttcaccttaattgtgggatttttattgtacgcaaattgtgaatctaagtgcaatctaatgcatcattcttttccattacggtttgtgcttttgtgtttaagaaattcttcccttccttaggtcacgaatatgttttctcctgtatgttttcttacatgtttgaagtgttccctttcacgtgtagttcttcattataatgttaagaattcatctattggaacacttgccatcttattagacctttgatttctatttttttatttttctttttataaagctttaagtgcttctaacctaagttgttattaggtttatcattgtgttcaccactcaggtaagattaatccttcgtgtggatgaggaacttttattaaacttcctgtaaatctagtttccccattaaggttcacattatgggaaattattgaggtggagtcttatgttaaagacaattacgttaagctttgggacttggaaggtacttattttgccctattataagcctagccagaaggtatagtgttttttttggcgagtagaaatagtaccttgggatgacacttaggtaattaaaatgacttgtgaggaacaactgtcaaaatcaaagtctagattcatttctaaacttgttttgataattattggtggttattaaaaaatagccttgagaactttgtttggaaataatgttaaactcacagagaagtcagaggatagtgagagtgtaggcctggaggctggggaagagctgggaggagctcagctcctggctccccttgccacatggtgtcagcaatattgactcaactcaggtgaggtgtttttgagaattattattgaaaattttgaaataggaattcattttatcaaggcaaatacatgaaaagctatactactcttaagagggaacaaaaagaaaattgacttaagtaacctattcattttgtctttgacttttgcttcgacgtgtactgtacgtatggaaaagtgcataggtcgcaagggtcaagcccagtggattttcacagactgcacgcaggcaaccagtagatctttcttctattattttctcatatttgactaggggtgaagctgtagacagtaatgattattgatgaaatttggagataggcaaaggtggatttgacagctttaaaatattaattgtttttaatagccaatactgtcacgtggctcaaaattcagaagtgcaaagggcttataggaatacgtcttccttcctctgcctccggcccctgggcttccgctgtgaattagccatcatggtgcctcaggtttcctgcgtatcatatcatatacaaacaattaagtttctacttctctccccgtttacatgaatggtagcgtaatacctaccatctatgtcttggaagatttcccatttggtaaataaaagaacttcgtctttttgatggacgttcgggctatttccagttctttcggcagtgtttctaggcggtcatttagcccaaggctccccaatctttttcacatcttgacattgactcaattcactcacgctgaggagcctgcctccaagggctgctgttaccccaatccctagctcctgtcccctccaccacccctacagccccataccactctaggcctggaaggattgttatctgggcacacatggaacttgttcatgttacacccgcacaccaaaatacaccagttatgaagctctgagttagccagtaagtacttgttaagggttcattaatgagcccagaactgccctctgaattggtagggaaattgcaaaagattgaaacatgaatggccacctttttctccctcaaggacttcagagtagttgaggagacaaagaccatatgttcatgaaccagttgaaaagaaattaaaaatatgaaacctgtgatactgattttaaatataaaacagtacagggaaggctgaaatggataatgttctttttatgaggaggcatatatcatcaagggaaattggagtttgcagcaaaatgtgtaaaaagataaaatcttccttgttagtctgtctcataaaggaatgttgaacatccatataccagaagcctggggtatttttcactttaataatagaagaaataatgtttctttttttaaaaaaaattcacacattataattgtacatatttatggagtatggtttaatgtattcatgtatatgttgtataaggatcaaatcaggaaggttgacatgtccatcacctcatgagaggtttttgaatgttctctccacaaagaaataatttttcttgactttgggttgtcacagagatgatttgtgttccagtagttccttcctcactcatttaggctgcccgttaaactcgcaggcctgagaaccaggcagaccctcagtggctagatgtcccaaagagtgagcactaatgctgcatgttctatccattatcaaaagtagggtattagggccgggcgtggcggctcagcactttgggaggccagggtgggtggnnnnnnnnnnnnnnnnnnnnnnnnnnnnnnnnnnnnnnnnnnnnnnnnnnnnnnnnnnnnnnnnnnnnnnnnnnnnnnnnnnnnnnnnnnnnnnnnnnnnnnnnnnnnnnnnnnnnnnnnnnnnnnnnnnnnnnnnnnnnnnnnnnnnnnnnnnnnnnnnnnnnnnnnnnnnnnnnnnnnnnnnnncagcctgggcaaagagcaaaactccgtctcaaaaaaaaaaaaaagtgggatattgaagtctctaatatcatcattattatttttgaggcagagtctcgctctgtcacccaggctggagtgcagtggcatgacctcagctcactgcaacctctgcctcctcggttcaagcgattctcaggcctcagtctcctgagtacctgggattacaggagtatgccaccatgcccagctaaattttgtatttttattagggatggggtttcaccatgttaaccaggctggtcttgaactcctggcctcaagtgatctgcctgcttcagcctcccaaaatgctgggatcacaagtgtgagccactgtacctagtcagaagtctctaatgttattgttgaattctctatttcttccttcagttctgtcaggtttttctccttttatttcagggctgtgttttgggatgtatatatgtttatatttgttatacctgtttgatggatagacacttttatcattataaaattccttctttgtttctagtaacaatttttgtctgaagtctgttttgtctgatattagtatgatgactccagctctcttggttaccatttgcatggtatatcttttttcatccttttactttcaacttgtttgtgtctttgaatgtaaagtgtgtctctcatgaagacagcatatagttggatcatttaaaaaatgcattctgccaatattgcctcataattggagtatttaattaatttgcatttaatataattactgatagaggaggacttatctctgccattttgctgttttctgtatgtcatatctttgtttttctgttactccagtactaccttttttattacctagtgtaccattgtaattcccttgtcatttcttttactgtattttttagtagtcgccttggggatgaacatcttacctgataatttagttctgatgaataccaacttaataacagtagtaaacacaagatttgctcatgtgtagctgtgttgtctcctccctttgtgctgttgttgtcaaataaattatatctttatacgttgtatgccagtcaacagagatttataataattgctttatgtacttatcttttaaatcagatcagagaaaaaaggaattacaaataaaaaatacatttatacccttttttacctatgtagttacccttatggggcttcttattcatgcctatttgagttactgtataatgttctttcatttcagcttgaaagacttcctttaatatttttcatagagcaagtttgctagagatgaattccttttgtttctcttggaatgtcctaatttctccttcacttttttcctaatttctcctccacttttaaaggacatctttcttggatatagaattcttagttgccaatctttttttcttttatcactttgaatggatgctttctggccttcatggtttctgataagaaatcagttgttaatcttattgaggatcctttgtatgtcatgagttgcttttcttgctactcttaagattctctttggcttttaacagtttgattaggatgtgtctaggtgatccctttgagtttatcatacttggagtttgttgtgtctcttggttatgtggcttgtttttcatcaaatttggagatttttcacttattatttcttgagtatttctgcccctttctctctgtttctgttttcctttggaatgcccgtcatgctgtgttctactcatttttactcctgttttctttctctttctcacactagataattgcaatggcctactttcagtttcatggattctttcctctgcctgttcaactctgttgtgatattttcatttcagatattgtacttttcaactccataatttctgtttggctcattaaaaatacaaataatttctgtcgccgtattggctgctttttccgcctttgtatgggccatactttcttgtttctttgatacctcataattttttttttttggaaactagacatttacttactattatttaaatgtgacaactcttgaaatctaccccttcagggatgttattgctgggttttgttgtttgtttagtgtcttttcagaaccagttccgtacagtgtattttttttgtatgtggccacggaagtctctacatgatttgcttagtgcttagctaatgactggacagagatttccttagatgcctggaactaaaaagttattggctctttgctgagggtctcttgtatacctgttggtgcttgccctgaacactcagcaggcatttgacaaccctgccttaaacttcacttaactacttaacttgcttgtacagagagcttagggccttcttgggtctttgctgaacatgcacacactcccacacatgcgtgtggccttgtagattcccaggagtaatatattgaagctttttcaaaaccccatattgcatcttattccctgcttttctttttaagctttttatttagcctgtttttttgtttgtttgttccccccacacactgcgtgtatggttagccatccccttgggcagtgctgcattcaacaattgcctgtgattgtttttgaccagccccctatccccttccaagaaggtgtttgcaataggaaaattctgagtcaggtcaaataaagacaacattgcaaggtcttccagggaaccaccagataggtcagataatgacagttctttgggaatggggctttgaaggagctccagcccctctttgacccctctaatggcttccaagctgctggtttttgctgtgattgtagactgttgtttttcaaggctagggtagaaaacagactggaaatagggcaaattaaaatgccaccaagcttactgttaccaaaatttttgtctttttcttgcataaatactgtctggattactgcaaatctttaatatccagagtcctggaaaggctgcctctgcccatttttgtcagtgttcgctttactttcagggcagacaggatttttggaggtcttcactctgccattttcactgatgtcacctaaaagcatctgttatggggacttagctccacagcttaaattttgctttttataattagatgaattacgctgagtgtcgccttatactctgtttaagaagtcagggtattgtgctctaaaaattagaaagacttccaaccaattagttacaatattcacatacattcatttcaaaaataaattttggacatctgtagcaagacactgtgctagctggggacacaacagtgcagaaagccaagaccatggtctcatatgctggtggagcgaggtggggtgcagtgagagacagtgcagaggagtatgtgtggtaagtttaggacatagcacagtggccagcatgagtggagtgacgaggcagagtggggcgaagggtaaggccagatggcatcagagttgaggggaggcagggaatgctgaggacattggtttgggcacaaataggcctgacttgaatcatggtgcttcattcagctttgttcttcactagctgtgtggtcttgggcagcgagttacctgactcccctgaaccttaatttccttaaagatggggtgagggtaaaaattgtctacgttatagggtggttccaaggataaattgagttgatgcatgttacctattaccatagctcatgtttgggacaggtgagtgcttgcttgtgaaatgtgagggctaccggaaactatcctcaagtatctgaaaagcaaagcccttcagaactcattccctgagaccaccacatagattttgatctatgtaaacaaatacttgaatatgctttgtagtaacattgtagtcttggaatctcatgtttttgtttttacaatttagggaagactattttgacagaaccaatcatagtttacctaaaatggatgtgttagttgctttggatctgtgattattttgttggcaaaacaaaccttctccaggtacatgaacatctctgaaatggttccaccattgggtatatcagagtcctgtgattgtgagagcctgttagcacactctcaggaggtgggatcgacatatcgttttctttatcttaagacatagcacagtggcatttcctgtatacatttgaagagattgagatcacagctgttatcacctcaattcccataatagaactggcgtgttagtccgttctcacacggctataaggaaatacctgagactgggtaatttataaagaaaagaggtttaattggctggtggttcagtaagcacaggcatgtgcttggcttctgggaggcttcagggagcttttactcatggtggaaggcaaagcgggagtcgacatctcacatggcacaagtgggagcaaggggaggggggtggtacacatgtttaaacaaccagatcttgaactaactcactgttaggaggacagcaccacagataaaccattcatgagggatccacccccatgatccagttcctcccaccaggacccacctccaacactggagattacatttcaacatgagatatgggtggggacaagtatccaaactatatcaacggtaatctgccttttaaaacgtatatcaatattcaaagcattttgaaataagaataaaacaaggctcagcagtggctcacgcctgtaatcgcagcaccaaggtgggagaatcacttgagcccaggagttcaagaccagcctgggcaacatagtaagaccctgtatctgccaaaaaaaaaaaaatcagctgggtattttgttgcacgcctgtggtcctagctactttggaggtgaggtgggaagatggcttgagcctggaaggttgaggctgcagggagctgtgactgtgccactgcacaccaaggcagaatactgtaagctgtatgggaaagcacagggtgggtgcctggatcaattagagcaggcaggatgagttggggagcggtgggaggcactctcgttgcctgggccacgcccttctgtaaaggtgactgggtttctggactgttccaaccaatcacgaaggcatcctttcacatttttaagaggtcttaagatggcatcatcgaagcttttgagtctttagttctaacatttaatcatctttattgaactaataagagtctggtgtttgaaaaggaacaggtgagggaacagaggtgcagctgcatctggtggtggcagtgttgttcacctcaggcagtgttgtctgggataggaaagtcggaggtgaagtgtaaggtttagaagtgtaagcgtgtgtgtggacgtgaagtattagcattgcctgtgggtcttagaccaggtgggagtttctcagaggcagaccgtctgcaagagaatcccttgaggtgcttgctgatgggcacatttctaggccccagacttggcaggtggagtccagtgatctgcgctgttgacaggcttctctggtgaatcttacacttgctagtgtttaagaaccgtcattgccatttatactcttaaaacatttcttatgatttagtgatgttatggatgtgtgggaactgaagttatgtttttgttaattgacatcatcccatttagccctgggtctttctagtaagtaacttttataaagtcaggttagtgggaggccagacttggcacacaaatgcccccagtcatatgtttgataggttaatgttttatatatatgtattcttttcctttcttctctcctctgagccatgttactggcaatgagttgtataaccagatgcagtaatgtgttacttaatgacagggatgcattctgaaaagtatatcctcaggtgattttgttgtataaacatcatagagagcacttacacaagcctagatggtacagcctccaacacacctaggctgtatggtgtagcctgcggctcctaggctacaaacctgtacagcatgttactgtgctgaatactgtaggcaactgtaagacaatggtaagtgtttgtatttctaaacatatcacaacatatgaaaggtacagtgaaaataaggtattacaatcttacgggaccacagtctaaggggtcagttgttgactgagacatcgttacaggggccaggactgtaaaagtgggcagatgatcagcactaaatcctgagtcccagtgtggaagtcctctgtagtagacgaggcctgagtcccagtgtggaagtcctctgtagtagacgaggcctgagtcccagtgtggaagtcctctgtagtagacgaggcctgagtcccagtgtggaagtcctctgtagtagacgaggcctgagtcccagtgtggaagtcctctgtagtagacgaggcctgagtcccagtgtggaagtcctctgtagtagacgaggcctgagtcccagtgtggaagtcctctgtagtagacgaggcctgagtcccagtgtggaagtactctgtagtagatgagatgatgaaaacaaaggacttttggcagggggttaaactgacaaacatcttaaagctaaaactataagatattttaaagcatcttttgtttctgtaattgatgatttcacacatgttcatgtggtctggttataagccttcttaagcctcagcttttgttagttgccatgaactgtaactccggatttatttatcaaacaaattatagtttaaacaaagtagttggccgggcatggtggctcatgtcatcctagcactttgggaggccaaggtgggtggatcacctgagatcaggagttcgggaccagcctggccaacatggcaaaaccctgtctctactaaaaatacaaaaaattagccgggcgtggtggtgggtgcctgtaatcccagctgctcgggaggctgaggcaggaaaatcacttgaacctggggggcagaggttgaagtgagcccagacagcgccactgcactacagcctgggcaaagagcaaaactctgtctcaaataaagtagttaacaaagtatttgttagtcactgtggtggtttttatgctcattttaaagtctttgataatcttcctcctggaagtggagcttaatttccctcctcttgactgtggagggacagggtgactcgaggctcctgaatggagtggagaataggaatctggtggacaccaccttgacatcacaggagtgggtcacatttgtgtcaggtaccccccccaccatgatggcatgagaaagacacatcagctctgcatagtcttccccaaatccacaaccccagtttaatcggagaaaacttcagacaaaaccaaggggtgggattttccgcaagatacttgacccgtgttcttcaaaagtgtcaggtcaggaaaagcaaggaaagaccgggaaactgtcaggctagaggtgaccaaggaggtgggattactaaatgtactgtggggccctagattggaagagaaaaaggacattagtgggaaaactggtgaaatctgaataaagtctgcactctaggtaatagtgtatacatgtatcagtttcttagttttgctctgtgtagcatagtcaagtgggatgttaacatcagaagaagcggggtgaagctgtgggaactgtctctgccatctttacaattcttctttaaatccaaaattgtcttgaagtacaaagtggctagaaccaagagataattggacacaaaaatgatgtcgctgtctctgcctctgtatcctgatggcttctccatgccaaggggaaactaggcaaagcaatagaagactagatcctctgtgactctaagtggatattgtgcaggatgtgatttttagcttattgacttctaagaactctgagacagaaaggtctttgtgtgtgagggctgtagacttctaacccttacaaagagcttatcagttgagcaagcttataatgtgctgtgttattactgtaaaaaatttgtaatggtaccattacagcaaaatgtttccctggctaaaaagatctttcagcgttcactcagcaatttaacgctcgggcttgctgacatcatcttggttaaccctgtagtgcttggcttctgtgttttctctcattgaactctggcagggattttaaaaaaaaaaagtacaaagctattttcttggatgtctagcaattacttccacagccttttcttaagaaacaaacaaaaaaactccctgtgacagaaaaatactataggtgctagtttttctttcacatagttaacatgtctgtgccgtctcctggaacaggtacactggttttaaagacacaacttttatttaaaatgatgtggtttatttaaggcagaaagttgagtacggtttcatttatttttaccacctgaggaatgcttgtttactttttaggtgcttatatattgattctgtaataatttagaattctggttactttattagggtaaagtgagcatggatattgaatatcccagataatacaaacttaatttttaaaactttgtttatatatatagagagagggagagagagagacactctcaacctgtcacccaaactagtgtgcagtggggcaagcttggctcctcccgggttcaagagattcttgtgccccagcgtcctgagtagctggaattacaggtacaccccagcacacctggctaattgttgttgttgttagtagagaggattttgccacgttggccaggctgttcttgaacttctgatctcaagtgatccgcccacctcggccttccagagtgctgggattacaggcgtgagccaccgcacccggcctgttaatatatatttttaaaaatttgtctgcgtacctgcgtgtgacaggccctgctataggcataggggctgccacagtgaacacagcaaagctcctattctctcaatgcatttgtttctctatggggatgtccgaaaataaggagacaaataaataaataatggcaggtggcactgagtctgaagcaatacaggcatgataaggcggccgactgatggagggacagggctgctcgcaggtggcactgagtctgaagcaatacaagcatgataaggcggtcgactgatggagggacggggctgctcgtccagctgagagagtgagaggcaaaccatggtcatatctgggaaaggacgttttgagcagttcaaacagagggaatgggcatgcggaggccctgaggcagtgattacgtccatgactgagaaaacacggaagctgagttagagcacgtgagtgagaggggcagcgtcctgtgaggcctgtccccttctgtgataagaacattgagggttacagtcagtgagctgagagggccctgagagttggggcagacgagcctccatttccagagggtccctctgctctgctcatggagaggcagctgcagagttgcagcagggaggttggttggcaggcatgctgatacatctgcgaagaggtgaggggaagtgactgggaccaggtgactggtgagaagtggtggataaatggataaattttgcaggtagagttgataggatgtggggagagagacaggttgcctgagcagttgaattcccagggaactcacagggatagggttcctggtaaaggggaagactggggaagttcaggcttgatatacaaataccatctgcagcatattgatggtatttaagtacacgggcagttagggagatagaggcagggtctgagggctgagccttgaggctccagtgggttagaggtcagaggtgagggggcaccagctgaggagactgagcagggaggccaatgaaataggaggaaactttgatttacgtttgcttagtttgcacttggaatgcttgaacactcactgtttgggtacttattacattaatagttgacttggatggcaggtatttgggagattcttatcaaaagtgaatattatgtttaaaaagagaatcctaggctgggcacagtggctcatgcttataatcccagcactttgggaggccgaggcaggcggatcccctgaggtcaggagttgaagaccagcctggccaacatggagaaaccccctcacaaaattagccgggcgtggtggcacatgcctgtaatcccagctacttgggaggctgaggcaggataattgcttgaacttgggaggtggaggttgctgtgagccaagatcacgccattgcactccagcctgggcaaaacgagcgaaactccatctcaagaaaaacaagaatcctctggtatgggtggacaaggatggggtatgtgctggtataacaatgggaaacttttttctctgctgatgactggtgtacgagacagtacttgaaaaaaatcaacctcagtggcagcctgagaaccagtggaccacagatggttggtggtcagcacctgggcagagctgagtggtgtttgtttggagaagtaagctgtggagtgtgggccctgtgttacagaggttttatttaccatgaaatttgacgtttgcttgtgttgatttaaaaatgtatgatttgtttatttttaaaaagataatccacccctccctacgtggaactggatgcatcctcgtgaagctgctttatacctttaccaactgcatagaaatctaccagggcctcagcctttgttttgtcgtctgcagtccatcaacttttagagactgaatgctgttgatcacttggtgatctaagcctttcataatacttaagatttctaactgacacttaacttggcagaaatcactattaatttcaggaggcagttataattgaacattgattcagttaagcctttgtaataaatagatttttttgggggtggatgaggtttaaagttatcttattcttttggtatagagagaaaccccatttaaactgcattcttctaagcctctgcttccgttcttccctaaaacaggattatttaaccttgttcgaggttgtactgcttgtagagagatagattcagagttttaatccaggcaggccgactggagcctgcagtttgaactctaatgatcacattttctttttctgtatgatactgcactatacctttttattgtaaataccgccagtatttgtttgaaaagaaccaataaagttgaaatgttgagaatttttgacaaaggggaaattttcctggttcttacatttcttcatttggtgggatacttttcgtatactcatgtgtttaacagtctattcaagtgacagctgttgggcctcatagaggggtttgtttttgaggcagggtcttgctctgtcaccctggctggcatggctgtagctcagtgcagcctcaaactcttgggctcaaacaatctcccacctcagccttctgttggcatgagccaccacgcccagcctgttttaacgtaagtttaactttaggagagttttatttatgcactgctggagtgcagtggcgcgatctcagctcactgcaacctccgcctcccaggttcaagcgattctcctgcattcaagtgattccccacctcagcctccctagtagctgggatacaggcacacaccaccacagcaggctaattttttgtatttttagtagagacggggtttcaccatgttgaccaggctgttctcaaactcctgacctcaggagatccacctgcctcagcctcccaaagggctgggattaacaggcatgagccactgtgcccagctggagagttttagatttacagaaaaattataaagataaaaatctatactttatttaaatgtccttagctttgacctgctgtcttttttctattgtcatatctccaggcttctcctgtcgcctgtctgtgccagtgtcttaggcattccttgtttttgatgatcttgacggttttgaggagtgctagtcaggtattttgtaaaattttcctctattcggatttgtctgatgtttttctcacaattagattggcgttatggatttctgaggggaagactgtagagataaaatgccatttccatcacatcatatcaagggtacgtaccgtcagcatggtttatcgttgttgatgttgaccttgatcacttgactgaagggagtgtctgtcaggtttcttcactgcagagttaccctttcccctcctttacatactgtgctcttcaggagaaggtcactaatatgcagctcacacttacgggtggggagttacactctccttccttgaggttggaatatctatgtgatttcttctgttcaggagggaaatttgtctgttcttcctcatttatttgttcagttatgtcaatatggccccatgcgtatttatattttggattatatacgcttttattttgttgctaaacttgttccacctttgtccactgggtgctctttcagttgctcggtcctccctccctccatcccttccttctgcactcctgcacctctttgctttctggcactagaagttgctccaggctcatctcgtgtatttcctgcccaaggcctagaatcagccatttcttcaaggaatcgaggctcttctcttggagaatggtattagaaagcaagacttgggtgctaggtatgcttgttgctattggggtgtcacttgcttggccccctcagatgacagaacatggaaatacctatgtgtatactaacccatgtgtatacacataattataaatatttctgtatgtgacgatctgtatgtatattaagctaagcatgaattgatagcatgaattgatagtgatgtctccagctctgattattaccatgtggatcgttctagcctccttctttgctaaactgtaacctcccaaacagtgagaaacctggcttttaccacccgccatccatttacttaattctgtaatttcagtgtacaagcataatggtttcagaattaacatatatctctttgggaaacaacttcagcaaatagagtacagtgcttatgtacattttcttttgcctttagtcttacagtcttcactcattctcacagttacttaggtcagcaccttctgctctgcccacttcagtgagattgtctcatacatttgtaatgcagttagattgttttgtcacactctgcattccatcctgggacccccgctcctgacctcctaaatgatttcgtaaaaatttatatacatccaggttagctctttgtgctttgtaaagttcatgggttttgacaaatgcagtgttatgtgtccaccattacagtatcatgcagaatggtttcactaccctacaaatccttgtgtttcacctattcagtgcttctccctccttcccaactgctaggtccttggcaccactgatctttttactgtctccgtagttttgctttttccaggatgtcatataattggaatcataccatacatagctctttcatactggattctttcacctaggagtctgcatctaggattcatccatgcctctgtgtggcttgatggctcacttctcttttaatcactgaatattattccatcgtacggatgtaccatatctgttcacccactgaaagacatttggttttcggcgattaggaataaagctgctataaacatttgtgtgcatgtttttgtggggacatacatttttaaatcagttgggtaaatatctaggagtatgactgctggattgtatataagactatgtttagctttgtaagaaactgccaaactttcttccagagtgtctgtagcattttgcattcccagctgcaatgaacaagagctccttctgctttgcatcctttccaggactgggtgttatcagtgttttggattttaaccattctaatagttatatagcggtgtctcatttttgttttaggaagaggtttttaatgccttcttgatggcttagtccaggctgaggtgcttttatttggtactgtgtttctagctgtttataatttgggcaagttgctctttccatttttgtattttaataatattaaagttaggcatgtttacgcctgactaatgagcatatggaaaattgttgaagtgatcttctctgaggttgggtttgatttttttaatgttctttttatgattgttcatgtgcctcaggcatctagaatattaataatatggattacttaaccttaatggtaatggcacaagtttttaagacaagtctgaacaacttacagaagattatcacattccatgtttcctacctagatgaatattaacaagctgaaaaagatcttgaagagatgtacatgaattgttcattcatttgttgatgaattcgtatctgatgatttgagacagagtctcgatttgttgcccaggctggagtgcagcggtgcagtctcagctcactgcagcctccacctcccaggttcaagcgattctcctgcctcggcctcctgggtagccgggactacaggcatgcactaccacgcctggctaatttttgtattttcagtagagacggggttttgccatgttggccaggctggtcttgaactgctgacctcaggtgatccacccacattggcctcctcagatgctgggattacaggcgtgagccaccacgcgtggcctatatttaaaaattatagaagattctataccatagcaactctgtgaaggtcttactcagtagctgttaaactttgtatcctaccccttcatctttttatggccttgaaaacttaagtttgctgtatctgatgatgtaggctcatactgatagtataccctggaaaaccttttaagattttaagctctgtaacttacagtctttatctactattctcagatctttacacattgtgttggttctcacattgctataaagaaatgcccgagacagggcagtttataaagaaaaggtttaattggctcatggttctgcaggcagtacaggaagtgtgatcctggcatctgcttggcttctggtgaagactcaggaaacttacaatcatggtggaaggcaaagtgggggcgaggtgtctcacatagtgggagcagaagcaagagaaagcgaagggaggaggtgccgcacacttttaaaaaacgagatcttgcgagaactcactgtcaagagaacagcaccaaggggaggtgctaaaccttatgcatgagaaatccacctccatgatccagccacctcccacctatgcatgagaaatccacctccatgatccagccacctcccacctatgcatgagaaatccacctccatgatccagccacctcccacctatgcatgagaaatccacctccatgatccagccacctcccacctatgcatgagaaatccacctccatgatccagccacctcccacctatgcatgagaaatccacctccatgatccagccacctcccacctatgcatgagaaatccacctccatgatccagccacctcccaccaggtccccctccaacatagggactgcaatccgacatgagattttatggaaacacagatccaagctgtatcactcagcattcatataccaaagtatgtaagcatctgttgcagttattgaggatatacacaagtgaaaattcagttattattttaagatggcagatgcagacacaacttgtgcagtgacgttgatgcagatcttactttagtccatgtcttcctaaaaaaaggacgtaaggtgcttttatgatataaactgtagtgaaatgggtatccttgcatcttacacaggccctggtaagtaggtgttcagggtatgtgagggacagggtcagtgggtggcgagatgtgctgcacccagtaatgtgaagctgctgtgtctaccaaatgcaagatgcggctgggtttgtcaaataggggccgtaagttctgcacacacagacagcagacacacatacacaccctgatgtctgtacacagcacagaaacagtttgtgcaatggggactctgcacaaggccagatgccatttcacaggcttttgccccaccagccccacaggtgatggatccaggtcacttgggactggcccacgtttaaccaattttccatgcctgggctatctgtttaaggttgaaggagccagttttcattggagggaaaatgagacagtggctagtttgccacattcttgtatttttgttttaaccgcattaggaaaagtaaaagcctcgtgatttttcaggtatgattgagtaagacttaaacaccgagtctaggaaattacacacagtaggaactatgtaaatatgtaatgtgggagtttgcttttcttcgtacctgtatcttctgtttcatcttgcttcaaggtgtgattaatcacaaagacatattttgtgctgctgtgctgctgtagtgttttggaatagtttgagtgacttcagcgtaatttatgccatcctacttgcttgttcatttgggtctctatgtcagctattgtgtggaatacatttgataaacaggatttatctgatttcagcagtattttgtcaggtagcacatttccttattttaaatttgagaataatcttagaatattcagtctgtttacttttagtataataactggcacttgggtttaattgtaccgtacttattatttgttttccattggtcagcctcttctaatttttttttccagtttcgatgctttttgtttttttccttcctctaccatttgtctaatggtaagctctagagattacctcacgcagttttgactttttaaagactataaactagtatcacttcccagaaaaaatgcaaggattttacaacactgtagcacaatgaagtcctccctccttttaggatatagttgtcaagtgtgtgtgtttcctacaagacatcattgtcactgttccatacagttgatttttatttagatttatattcatggttgcccttcctcttactctgttttccttactacacctccgttcttccatctggatttcttcctcttttcggaagaattaactctttcagatttcctttaatatagattttctattgataatttcttcatttttgtcaagtattaatttcaccttcctattttttattcaatatttatgaaaaaattttaaattgaaagtgttttcagtcagtatttatatacttaccacctggattctaccagtaatactttattatacttgctttattacatatctgtccaaccatcttatattttgatgcatttcagagttaattggtacactttccttcaagtgttttctacatgtttattattacctagagttgcatattgacttacagtttgctattcttttagatcatgtttatattcaacaaaatgcacaaatcttaagcttgcattcacctagttttgataagtgcatacacatgtagtaacccagactccttgtaagatgtatattacatttacctcagaaagttcctcctgtccttcccaatgaatctcccagctcaaggcaaccactgttgtgattttcttctgccaaagattgattctgtcctctaacttaatataaatggaatcatacgtgtggactcttgtataaggcttctctcacttgagcatgtttctgaggctcatccatacagtcgtgtgtatcagttgctcattcctttttattgcttagtaaacttcacctggagtatttctagtttttttactattatgaacaaagttgctttgactactcttgaacaagattttgtttgtggacattttttaatatttttttgaataaatacctagaagtggaattgctcggtcagaggataggtatatacttaatttcataagaaactgccatgtgttttttccccaaagtagccgtatcttattaactcccaacagcaccgtatgagagttctggttatttcatgtcctcatcattgtttggcattctcagtcttttatggttttagacattctgatgggtgtgtagtgcatttacttcattgtgatttcagtttgcgttttccctatgactagtgatactgagtgcctttccatgtgcttattgatcatgtgcctgtcttttgtgcagtgtctgttcacaccttttgtccatgacttttgcctaccccaagtcttgaagttgttctcctgtctttaagccacctactttttttttttttttggatgatatattttctaggtatagaattccagattggcaggggttttttgtttgtttgttcgtcttactattcttgagcgcttggaagatatcattccattgccttctgatttcagttattttctgatgaaatcacctctcaagtcgtattgttttttctttgaaggtattttatcttttctctgtatttaggattatttctcccttgatagtcaaataatagaaattttttttctctttgattttgagtagtcctattatgatgtgcccagttatactgtctttgtatttattcagctgtgattcactgaacttcttaaatctgtgggtttacatctttcgtcagtattagaaatttctcagccattatttttataaatattgcttctgtcccatttttgcatctgtttctgggtctctagttacatatatattacacattttcactgagtcctatacgtgttttatgttattttcagtattctttttcactctaagatctctggattttttccgtctgacacacctttcattatactaatatctcttcagttgtatctaatctgccatcacacctattgtgctttgtttgttttttgagactaagtctcgctctttcgcacaggctggagtgcagtggtgcaatctcagctcactgcaacctccatctcccaggttcaagtgatttttctgcctcagcctcccaggtagctgggattagaggtgcctgccaccacgcccggctaatttttgtatttttagtagagacagggctttatcatgttggccaggctggtcatgaactcctgacctcaggtgatccaccctcctcagcctccccaagtgctgggattacaggcctgagccactgtgcccagcctaaacctattgcattttaacttttagctgtgtattttaattttagttatttcatttgatatttttaatagtttaatattgtctgctaaacttctacatcttatcatctgtttcctggacatattaatcacattatttcaaagcccatatctgacaagtataggtttctcttgtctgtttttcttggttttcagtcacttggtcttaaacagctggcatgtttagtagcttttgactgaatcacaaacattgtatttaaaaaaaactggaatgtctttggatatgattactgtcctccagtgaggatataattttgcttctggcagacagttaaggttggaccacgtaaccttaatccaatcagatattgagctgagttttgaatcagctgcttcatttttctaagacttggtctatttctggcccacccctgctcttaagatgcagttctccttttctccctccactttcctccatttcgcagtcttcttgattatgatttctttaaaatcacaacttagattctagttttctttgactaaaaaaaactatttgtaattttaaaactcaagaaaataggatttgagattcaaagcattacttttccagtatccatctagtgtctctgtatctcttctagacgttgtttaaatggggattagtttttctattaaatgtagggtttttgcaatgacaggaagataaagtcttaagaggtttatgtttaaggtgtgatggtgccttcagcctctttttctgctaagcacttttgctttgcacattatgcagaattgtggctataataggccttactaactccctgtggccaagtatttttaaaatctgacaataaaaggtactggctaatctgtttagtgagtgattataatcaaatcatattccaaggttacagatcttgtttttgaactttgtttttttcttttccatgctttttcctagaaacattcagaaagttttaccaaggttaatcagtaggcaggaagagaaataacggactaagagttgaagacaagtgctttaagaaacttactcagtattttaacgacactaacttgtagtaacctcaaagagtcttcattacaaaatttaaggcacttgtatactttttgtatactttctgtgttgaacttgccatttcagttgtcattcagtacagatcagtcacatgccagtagatttctttttagcttatagtgttgtcctcacatcttccacactaagaaactgaagaatgccactatgtatcttctaagaaaatacctgtctgttggaacagtttctgattcactatttataacctgccctgagaattaaacatagaaaatatagaaagattcatttttactgccctttctcctcctctgctgacttcatgcaaacatttcttattgttgcatagcaactgatcctgctatttgttatttttgtttagcaggtttttttttcccatggaatattgaattcatatcacaatttccagtctctgaagctcagtgataaaggtttttacttaaccctttttccttaaaacaaaaagcttcacggcatacaggtatatatcgctttattcttcttacgtaagtctatgtataagttgaagttttattaaaacggatggcattttacgaacactggcattatgtccttagtcactttcagtctgaaacaggtctccatccttttcttgatttttatgaccttgacacttctggagcttacagaccagtggaatgtttatcagtttgcatttattttctcatgattaggttcaagtgtgcagatactacagaagcgttgctgtgttctctttgtatcctaacagtttgtgattttggtttgctctgttattggtagtattaactttggtcatttaactaaggtagagtgattaggaaaacctggccaggtttctccactgtaaagttactctctgtctttttatatttagtgagtgtcattgtggagagactgtaaatatcctgttcctcatcaaactcccacccccaatagttttagcattaattgatgtttcttggcagaataaatgaatagtgtgatggttgctaaatggtgattttctaatccagttattctttctacttttattagttgaaagtaaggaaaagcttgttccttttcccatttacttatgtgtgtgcttgtatgagtatacactcttgtattcctattttatttaatgagttataatctcttaccattattatacatttccatgtttacatcaccttagacgtgtccagtggctgctgtttgttgcaggcttctgtatctcttttttttttttttttgagatggagccttgctctgtcacccaggctggagtgcagtggcacgatctcggttcactgcaacctccgcctcctgggttcaagcaattctcatgcctctacctcccgagtagttggtattacaggcgtccgccaccatacctggctaatttttgtatttttagtagagacggggtttcaccatgttggtcaggctggtctcgaactcctgacctcaaatgatccacccgccttgggttcccaaagtgctgggattccaggcatgaggcaccatgactggccttctgtatctttttgatatgccccataactgtttgagcaatttctttctggcatactaagatgtttcaggctgttattttttccctgccctagccttgcagtctgccatctctcgaagagtctctggttctttttagtggaaaacatttagaagccaagatctagactgtgggtgtgctcgttgctgtgggtgttggctggcccactcctgagcagtgggctgaccaggggaaaatgtgcatgtgtgtgtgtgtccttgggttccccctgatactccaaatcccatttcaaccccaaagggttcttcctcttctctccctttctgtatttgtaattgctttatttgacagttgagaaatctagctgctcattggcctcagccacatttacttactgcatcagtttccgctgtaagtgagcaatcctctgttgcaatgcctccttcccggtgccttccctatgtgactcaactcaagggttggcggcctacctgacgccccaaggctgggccactgcaccagcccaccctcaccccatctggggaccctatcttgcttgaccccactagtggctttttacttcaggacaacgggtggggcaggggcaagaagcctaactccatcttgaaataagcttttcaattttagttactagattccaggtactacctgtgtcacatggcaacgcagccctcattctcagaggattttaaaaacctgttggtaaatttagcaagactgaatatttgcttggatagtatattctggaagatctattttctttgagtgtttatttgtgccaaatattcaactttttttttctagtagattgggtcttgtcttaattatttctgtattccatttagaggttaacatatgaggcacttgagtgtttgatgaattaacagatacagagcatatgagagaggcacctggaaatttaagaaaaatatcctgttaacattgaaatgaaatattatataacatactagaaggtattgttgttcacagatagccagcatcatgagttggttctaaaaatcagaatgaacaatttttaaaatactgttgttagttggcgaagtgaagacttggtgacgctgattcttcccattctgaagggttatgtggacgtaactctttcctttgctttcagccaaagactttttatttccaaaaatgaggtatagaagaaaagacttttattcccattttggatagtgagtggcttatttttcttttgactgcaaatgctgtgttaatataaaaaacatttgtcaagagtagaccctttctgagaaatatattagacaatatttgtttcagttatcttagtaggatttttccccttttaggttttgtttgtttccttttggctttgttttgtttggtcttgtttcttttaaattaaactaattttggaatgtgctgacacgcgagagtggtactggatagccagtggaaatgcgtggcatacgttcctagaacattaattttacctgaggtctgggagagagactttttttatgagataaacatgggtgtcctagagtatcattgcaaattagtgtgaatttttatgattaaaaatgagaaaagaaatttggtattttttggaggactattttaggctgtgccccaaaaccctgggaatatttgttcactctctctgccattatggctgcttctgtgtagggaaaataaaatgacaaacctacatgttttctcacagatgataaatgtatttcttcttctctgtagcctattaattaatatctaacactgctgtctcttctagcttccacagtttactttcttttggtgcataatttaatgagtgttcgtttattttctgaagtgttatttgtataaagtgagcccacataaaagcttctttccaaagtgttttcatgggaaacggatcttggtggtgatctgtcacttagcacgtcaccgccttcagagccccagctgatgactaaccccacagtgggagctgctacccctgcctgtgggtagtgtgccatgtcctccctcactgcgacctccacccctgcctctgactcagtggttctcttcagtggatcatatgagtctttagaaacaaatacctggtcgttggttctcctgccgactcgagacctggtgggttttcccttgtctgtctagtttcactccgtggcgcacgaggcacaccatgcctgtgcagccctagtcttatctcctgaatcaaacctctcgcctcagaggctcacccggggagagaaaggagagcagacagagattggagtttgaaattaaacttctcatttagtattgcaaacgttatgaagcatatatcaaaaatcaaatgtcctggaatcctgctgccttagtgatggagcgtattactgtctataggaacttgaaatagaaaacactaccataccaggatcatggggtagagcaaattaataaacaatcttctttttttttttttgagacggagtctctctctttcgcccaggctggagtgtagtggcgctatctcggctcactgcaagctccgcctcctgggttcacgccattctcctgcctcagcccccctgagtagctgggactacgggcgcccaccaccacgcccagctaattttttgtatttttagtagagacggggtttcaccgttttatccaggatggtctcgatctcctgatctcgtgatccacccacctcagcctcccaaagtactgggattacaggtgtgagccaccacgcccggccaacaatcttcaaaattaaaattcttcacttagagcagaataagcatgtatgggtttgtgtgtttaaatgtcaggctgctaatactaatagtcgttagtagaaaaatcaagctcagttttgtgatcacagtactcttcaggtttgggtatgtgtcttttcacaagtagctataaacatctggtagacctgtgtgttttctctagttatcaggaaacattgtggagtctatgtcaattgattactagcttgtttatataaatggggaaatataaagaccaggctttttcttaaacaactgaagagtatgctggttctagtttctttcctctgaatcatgtgtgtgtggtggcaatttagtgactgggaggcactggaaattattggttataataaattgatgtcatgcccacagcacagcaggcaaaaaggatgaattagagacagaaatagtaatagggttttgtccaggaaacctcaagcatatgaggtattgccatgttgattactttaaaaaaagaaaaaaaaagataaaatattagaactttaagcttaataaaaatagattacagaggaaaaacttcttgctttatgcttctgaaaatctctctgagtagttaaagagctgtttagaaatctgttagccatactttcatgatttgctggtggatagagtatgtagtattgcgaaaaattagttactatgatcttcgccaagtgacagtattcttaactctgccagatggtcttttttgtgtgtgtggcggggggatggagtctcgttctagtgcccaggctggaatgctgtggtgtgaccttggctcactgcaactttcggctcctgggttcaagcaattcttgtgcctcagcctcctgaacagctgggattataggtgtgtgccaccatgcccagctaattttttgtagttttagtagaaatggggtttcattatgtcagtcaggctggtcttgaacccctgtcctcaagtgatctgcctaccttggcctcccaaagtgctgggattacaggtgtgagccaccatgcccagctggatggtcatttttaaccactgttttttggggggcaatttttattttgaaaaaatttaacttaatagaaaactcctataagtctttcacccaaattccctgattattaatatttaccacatcagctttatcattttctctataagtgtacattattattattattattattattattattattatttgagatggagtttcgctcttactgcccagtctagagtgcaatggcacgatctcgactcactgcaccctccatctcccgggttcaagtgattctcctgcctcaccctcccgagtagctgggattacaggtgcacgccaccacgcccagctaatttttgtatttttagtagagatggggtttcgccatattggccaggctagtctcgaactcctgacctcagctgatccacccacctcggcctcctaaaatgctgggatttacaggtgtgagccactgtgcccggcctacattagttttttctgaaccatttggaagttgcagatataatgctctttttgcccttaaatcagtatgtatttcctaagaacaaggtcattcattgacataaacacaacgcagtaatcaaaatcagggaaattaacgttgatacagcacagttatgtaatctacagagtttagtcatattctgtcagttgtcccagtaatgtccttcatagcaaaataaagaacttgaggtgttccagagtgtagtctagggtcacatgcagcatttatatggtatgtctctttaagtgccctttaaccttgaccttgtctttgctgttcatgaccttgacgttgttgaaaagtacagatgagttattttgtagttatttgtccttcagtctgggtttatctgatgtttccccaggctacgtgatgtgtcctcagtgcctcacatcaggagcacatgatttcggtgtatgatccatacaggcagtgttaactttgatctcttgccacgattctcctctgtaaaaatcactacttttgcctttgttatttaataaataccttatagggaaatattttgaggccatgagatatcctattcctcctgtaagcatcatccactaatttttacttgagttaatgatgagttaatcatccacatgatttttacttgaattaatgatgtttgtcaaatgatgatattgttgagcagccgtatatgggggcttttggtaattcttagaagaattctgtttctccattcttagaagtagtttgaatgactgtagttgtgggaagcctttgtattgaaattagtgtgtctcttttcctctatcctcctgcacacttggatgtgtggccttgacctgtggagtgggctgcctaaagggagaaggtccatgcctgtcaggactgtggacagggtctactggctgtgctgtgggcgcccacgctgcctttatactccctcaccccccctatttcaggggtttgtggtttctgcaacccagtgcatttctactttaaagcttggctttaggtgcaatcagttgttaataaaattgatttgtggttgttttcttgtttgtttacttgaaaatagccgttactgaatcccattgtcacatttttatttttatatgctaaccagcactagtaatgtttttctctggaaacaagtaacctctctatagcagtgcagattggattttaagaaatgtggaatttaggtctacatccagcataaaacccaaagaccatgttatactccccaaattatagctggttcatgatggtaaaatattttttttcttgtttgattaccattacataatggcttttaagttattagtcctcattttataatcttttagtcttaaccacctctcccaaaatccctaaatttgcaaactactatttatatgttagccttttaaagttaaaaaaaatcctaaatgagagtcaccttattccatgtttaccagtgagtgctgcaaggggtcagaaatgccctccatcctcccctgcagcctctgctgtgtctgagatcccactgcccctcctgcagaaatgccctccatcctcccctgcagcctctgctgtgtctgagatcccactgccccccctgcagaaatgccctccatcctcccctgcagcctctgctgtgtctgagatcccactgcccctcctgcagaaatgccctccatcctcccctgcagcctctgctgtgtctgagatcccactgccccccctgcagaaatgccctccatccttccctgcagcctctgctgtgtctgacatcccactgcccctcctgctgcttccaccctggcaagcttgataggaccagagcttgtcatcagcagcttctgaaattgctaaagctcatggaatgcagtctgtcccataatttagccccgattgaaagctgaagtgtgttgagggctgagggttgtcctccttagctgctgtagtgggcccttccctggctggcttgctgctggcctgagattccttctaaccccctcctggacacctactgggagaacatgaaggcagcctccagttctctttgaacacagttcaggaaaggtggaaggtaacagccttcctttccatctggttaggctgatctctctaagaaacactggctggaatgaaagaagggcagcccctaccagcccagggccaccagagctgccagggaacgcctgtctgtgtttcttccctgctgctggtacttgcaacctctgtcatcctgccatccagtgactcacagctgcagccctagctaagatttaactcctcttggagtcttcctgcctcctctcctcccaccccactgcccaaccgcctgctggaaaggcagccctgccgctccaccaatcagatgggtcagaccagccccagaaggatgggaaggagttaggctgggcgggctcattggcttcctccttgttcttaggcatctttctcatgtgagcctttctcttctgctcactcgtccccaccttgttctataggacgtttggtggttcctcctgccaggatgccttaacgttgatattcacggaaggctgagggtcgggggagtaataggcaactccttctttaaccaccagcctcattattcattattttctttatgtagtggatttttgccagacatgcattacaatctcagatgattctactctatacccatttgtggggaatcactgttctctaagaggaattaaaggagatttcacattctctctctggcttgccccgccacccccgaccacctccccccgcaccgcccccacctatagacacactctgggttgccctgggagggcagtgggcagtgggatattggatattgtgtttcagaaggtgtacaggctcccacagaccctggctcaggcagggaagggggacaggatttacccagggtggctgacttcgcacacatggcgagggagaacctcctgcctcatccacagaactgtggcctggcaacatgagacctggcagagggaggaggggtggctggaatgtgaggagacctaaggggtatgcagagcagttggggtgggtcgaattattcccagcaagcaacatgaccagggttccatattgaaagaccaccccgacaggttcagagcaaggtgaggctggggcagaggagacctaagagatttctgcaacagccaggtaagaaatgaagagaatcatagctgagaggcttgcttgcgggctgcagaagagtgggtacatcggagagactcgggagctgcatctggaagagtctggtccctgacccatctgggggtgcaggggctggcaggtgttcttagtcagtgcatctttcatggtacttaagaacagttcttgaacaattctcctaaccttgtttgtactgttagtttgccctgaattgtaaccccagaaaagacttttgtgacttttctggtccaaaccaggcaggagacaaactgggaccaaattagtcaggagacttgctcgaggacacagcctgtgagaagcaggccaggctccagcccgtgtcttcttcgcgttgtgtttacccgtcatgtgaaatgcagtaggactgcaaacctgaataattttgtcgatagatggcatttttgcgtaaaggcgtctcttattttttacgtggatactctttaaaatgaaaatcaaaaaagttattctggaagtaaactggctcatgaaatgacaacatatggtgacagcatttcgtcttattcaacctagaatgtcatcttagttcccggatgataagggatatttggaatgaggtatttattttatgttgtagaatattggataactgccacagtaccgggcatatagtgagtattcacaaaacattggttgcgtgaaacgaattgtgtgagtcactttttcttgtatcttattcagaacgatgcttcagagggcttttgtgactcacttgtctccagttgctgatgcagctgtaatgctgttagacacagggatcaaatgaacatacgctgctgttcgtggttttgggggttctattttggggagtgctatgtctgtttttagtttcttgaaactgccttttatgcacaaaaccgaagtagactgaatctataactgcagagccacacagaatctggtgcgtcgtgtttcctgtccagcattgccacttccaggtttttcatctaacttgaataaaacatgtttattttttacagaatttccacaaaattttatttttgaagttgcttttcagaaaatctgtttttaactggtaaaatacatgtcacatctaaatacacagttcagtcatttaagtatgtaagttgcgcaaccagtctccagaactgtttcatctgaaatgatgtgttttttgtttgttcgtttgtttgtttttgagacggagtctcaccctgccgcccaggctggagtgcagtagcacaatctcggctcactgcaacttccgcctcctgggttcaagcgattctcctgcctcagtctcctgagtagctggaactacaggcgcgtgctaccacgcccggctaattttttgtatttttagtagagacggagtttcaccatgttagccaggatggtctccatctcctgacctcatgatccacccacctcggcctcccaaagtgcagggattacaggcatgagccactgcgcccggccgcagtgatgttttttgaaggagttctgttagaattgaaaaggtaggaagctggaggcgcagtgtccacaaatgtaacagagtgtcttggtgtcaggaaaacacagcagggcacaggtcaggcatgtggtttgggcagcagcagtgggagcagggagcagctcagtggtagatgggaaggcaaactgcttaggaggatgccacacttaggaatgagtttctttaggcgaagtctgcacgtgcctggtttacctccagtaagtggggctccagcataaaggtgaaggctctggatcacagccagcagactctttgtgctgtgtaaagggttggcgggtaaatgttttagggtttttgcaggccgtgggatctcgctcccagctgctcagcttagccactgtaatgcaaaaacagctgtagacagtaacaaaagtgagtgtaactgtgtcccagtagaagttttaatgggggattttggccagtgggccgtagtgtgccgacccctgccctgagttacagatgtaagtgtttctgttttgggcctggtactacgactgctgtttcctctcaagttatccagtttttgaaagtacgctttctccgcagtgagatgggagcagtacctgtaaaacctgtgcctggcatgcgatgacatgagataatctgtaaaatgccactcggaaagtagaagttactgatgtgttttttgtgagcggtgactctgaaaactggcttttaaatcatagttcgttcatgggttcccgtgtttaatgtagtagccaacttaagacttacgagagggccaaaccaccgtcacagacacccgagaggacgcagcagagacagatgttaatttctctgtccagtaacgggatggcttttccaggatttcgggggactgtgttccttgtcattgaggggtccagggtcttccattttgctttactgccgtctcctgtggcattgtccttcaccggtcagtagcgtggctgctgtgcttaggtgacagacagctgcaggagaggaaagagcctggagacacagagctcagagccaggtcttaagcacaagccaaaaggggagcgggtctctcactcacactctgcttgggggggtcttggttcacacctaactggacagaaggcccgatagccggagtcagaccacagtctgtcaccacaggggaagggggacagatacattggcgatgaggtcgcagtctgtgcgacgtgacggaaacaaatccttacatcccaaagtgagtccccagcaggctttcctctctttggtggactgggtttttgtttctcaggtttcagatataaggcgtccaaataccactcgcggaattcttagcgtataccaaggtcagatgtttaagaaatgctattgcacaatgtagtttaattgacttttaggtttaaaagctcctaatttgagattcaaataggcttctaacaagtatttccattcgtaagaatcctggcttcttaggaatcggtcacctgtatttgtagttttggttttgctgtatagtaatttaacattatatacatttatagctttacattatataaggaatttatcatttaacattataaattgtttataatttaacattatataaatgccgtaatttggggtgtccttagatatttgccctgaatttgtctctcctagaaaatcattctggctgtaatcgtagatacaaggacttgggaatcttctcagagtataaaccagcagatcagtccagatggaaacgtttcccttagggttccttcctttaaatttgtgttatatggcttttagttcttcctctgccataacaggtgagcttgggaatacatttgtgattaaacttacatttgggcaggtatggaagtgtcttgtgattagttaccaaagcttaacgtgacctttaaataaggaacataattaatgggcttccagtcaaatatatcaataatttgagggaagaatcttaaattgccaggcattgcctctccccactccttccacccgttggggctggccttgaactcctgggctcaagtgatcctcctgcctcagcctcctgagtagcttggactacaggcatgtaccaccgcacctggccggaaaatctcaaattgcataatgccactttctttgggaagaaatcaagcaaaatttgtgattcttgagtatctgtatagatgtatacttgtgaagtaggtaaacaaagaataaaagaattaagactaaacatgctttgcccctttttgttctaggaatgtaccagtagttcactgaattgctggggtcacatacagccaatgtggtatattgaagggtttttttaaaattattttttctttcaaatacaaatgaggtcttgctatatttcttaggctgtcctcgagctcctgagctctagcggttcccttgccttgacctcccaaagtgctgggattataggcatgagccaccatgcccagcctatatcgaatgtttgacaaatacatttgaagccagggcatttacatttaaattgtggctttattgctggtgttggctaatcgtcctatagttcgcatagtgtatatggttcctagtgtatatagtttatagtctagtcatggatctcggggtgtaatcccgcttggtggcattacagtgctgtggcttctctcaagttagtttgacatgagttataccctaagataataacagtggttatcactaggtagacagaataggtttaatgtttctttttacctctctgagttttcctggtttctgccagtaaacatgggttatgccgtaaaccttcccacttctgacacctggccttcacatcagcatgggacaccagaaagtgcctgaataagagccagcaaagaaaaatgttttcatttcttctagtgtaatttatacttatggatctcatgagaattacattgtttagttagggtatgcttattttacatatatgtttttttttttttttttgagactgcttctcgctctgtcacccacgctggagtacagtgctgtgatcttggctcactctgtctcccaggttcaagtcattcttccgcctcagctggaattacaggcgccctccactacacctggctaatttttgtatttttagtagagacagggtttcaccacgttagccaagctgatctcgaactcctgacctcaagtgattcacctgcctcagcctcccaaagtgttgggattacaggcatgagccactgctcctggtcttgtatgtccatttttaatatttatatataatttatattaactaactggggtgtcgacactatgtatctggaatttgaatctatttgatagtctctcctgcaattacctcctccctggagacagggttttttttttttttttttgagacggagtcttgctgtcacccaagctggagtgcagtggcactatctcggctcactgcaagctccgcctcccaggttcacaccattctctcgcctcagcctcctgagtagctaggactacaggcacccgccaccacgcccggttaattttgtttttgtatttttagtagaaacagggtttcaccgtgttagctagtatggtttcgatctcctgacctcatgatctgcccgtctcagcctcccaaggtgctgggattagaggcatgggccaccacacccggccagcttttaaataaaaaatgtaataaaaagtttgtagctttcggttgacacatgacttatacctttaccattagcctttaaactttctcacatctgtgaaatttttgttgttcttatagcttataattttcatgtctctttttctttggttgaaatcctgacacaaatagtaggatagcttggttttatttagcagttaatgttgttaactatttcaggaaaataagatgatccaaaatatgattattgctcaggtgtgatatatgagtatgtaagtactgtatagtttgcaaagtataattagttttgtaatcttatatgtgaatatgttgcattagaaggaatatttttcaaatgtcagagtaggattatgagtgattcctcccgtttccagaattttataataagtatatattgttttataataataaagaaggtttaaaaatagttcatcgtaagtgatgtaaatgtttctacttgacggcattttaagagtcgcgtgggttatgggcgagcttatgaaatgcggtttgtaagactacttttcattcatgaatccctctatttcattgtagtcagtctgttataagacatatgttgtggaatctgttcaaaacctggggaggaagtgcatgagatcttatcttcttggcatcagaagtgtactcttgaaagtagaattttgactttttgagatgccactgtttatcctcccacccttcacagctctccctgtctcccttctcccaacccaacccatgcatacaaaaagtcagggtttgtgatttaatttagaaatagaggcaagattagaaaatggaattgtgtggagacttggagatcatgtagcatgcagcagatctgttctaggaggagtaggaagctctggttgtgagtgattgaagaccactgcactgttcagaagcagctgtcgcatcctcttccgttcagcacctgattattatgtagctttatttaatggtgcaaaataccaagtagagaacaaggaacataagggcaaaattaatggctggatagctgttgtggctacgtaattctgatctaaaattagtttagaaattacaattgaaaatgcaattgtgaaatatcattttgaaatactttaaaatgctgcctagcctactgaaatgtttctcagttgaggtacccatgtaaaatgtgtgcgtacacatggacacacaaacaggctaagaaagaagcagaggagtagagacatttaattagttgagacaggtttacctccaatgaaatttttcttttctttcagtttgtagcacgtgggtggtctatgtgttaatgttaataataaaacagaagttacccattcttagattacttaactctactgtcactagtgatggctttcctgccgaaggcgctccgtagctacatgaagagggcacagagaaaattacttgaagctttcgagtcactttcacttttaaaagatgctggtggcctttggatcccactttgccctggtgcttggccaaggccagggcatctgaccgcccctgagcacatggaggaagaaggtggtagagggaggtgtggaaatccacgctgatggccctacccttgctggtgccctctgttgctgggactcagtgccccacctgctcaccaagcagaagtgatgtcagagtggtctccatggccaagagagcaggttttgtcaggcaaggaaggagcgtgaagatgcacactctcctggtgtggagcatggtgctatccccagcgtgtcttcctcggtgccaggagtgttggtattgtgtgcacattaaatagaggactttcccactcttctctttactcttatgcattatctgacccaaatttgggtccatggagtaaacatacttggtcagaaactgtgaatagtcatttccagcatttaaacctttcttgctgatgacgccattaaaatacgcacatgtgcatgcacacagcgtgactgcggctggagaggaaggagcgttcgcctgctcccgggcagctggtcaggctggtggcccagccgttatgcttgctccgtgctccagggtgtggccccttgcccaggggaagaaatgaatgttctgaaagagcacagcgtattcttcagtctgctccaaggttgattccctctggaaagcttccctggccccctcactgctgtctggtctccctcaggttttccctgctggagaggccttccctgacccaaggatatgatgctgcagccctgccctcgctgctgtctccccagcttcgtggttctccaaagctctcatccccgtctgacacactccttgtttgttgcctgcttgccggacaggcatttctagttgtcttgtcaagaaccagcccgagagagagctgagagccaacctcggctttgctgtgtgcagtggctgcggggtgtgagcaagttgctgaacgcacaaactagagtatccctgaaagtaaaacgtgcacagtaacagagctacctcgtcggattacaccagtgcatacagggtaggtccttggtatagcttccgagagatgttagttgttaatgttattatataaaatcacataaattatttcacttcaatgggagaggagtggtaataagcattttttaaaattgggtgcctctgaagggtgaaagggctggctgacagtttaaacatgttgcctagagtttagctaaaaggatagttgaatgattgtgcagggaggtaggttattttggaaatacatgtaggatgattactttcagctatgacatcttaacctttggataaatgtttattaagggaatacattaatgccaggctctgctgtgtgctgtgagtgtggaaagaatctgtgagacctgccttcaaggcacctctgtggagccacgagggaggcatttagaactctgaattctgagaattctagttgatcctctttgaaggatgcttttcctctcgtatttctgaagatattgatcttctgtatttgaaagtccccttgtcttagctcttgttgccatattgtttgggagtggggggagttggggttaaggttggctgtcttgccttggctggtctgccccagacccctgcctggctgtctgggaatctgaggggtaggaggtgggggtagggatggggatgtcttttctgagcaggcaaaggccctgtgcagagtgtgtgttctcttagctcttgtttattgggcatgacacgtctcttctgttgtaatgtttacgtattgacaggagccacttacattgttgtctgtgattaatctttttgtccttacctgtaaacgagatacagtatctactcattcatttattcagcaagtacttagagggcaattactcagtgcttggcacctagaacaaaatgagttttgctctcaaggagtttaaaattgtgaggattaaatgagtgtgttgagagagagagaagtatggtatctcatagcagatgcttaaaaatatttctctcttctttttgtatagggctttttagtttagaatactgtgttaaagaacaaacaatcctactcattgttaattattaattacttgcattttatttccacctacctctttccacaaaggatctgaagtttagtgtattttatatatttctgtaaattttttttttttgcttagagcagtgagtagatagatggatgaaggaaggaaaatgaatgaatttattataaatgagaagccagagaaaaagtactaccagtttcccctacaatctacttaacatagataatttgaggatgttttttccctaataggttgctttaaaaaaaaattaagttttttggaggagctttaggttcacagcgaaattgagtggaatgtgcagagatttcccaagtggcgcctgcccctacacgtgcacagtctcccccaatatggacaccttgtaccagagtggtggtacctttgttacaattggtgaacctacagtgacatatcattatcacccgaagtccacagtttacaataggagtcactcttggtgttgaacattctgtgggtttaaacaagtttatgacagataccctcatatatgtatcatacagaacagttcactgtcctaaaaatcctctgtgatctgcctggtcatccttccttcccctgtaacccctggcaaccactcatctttttactgtcttcatagttttgccttgttttgttttacagtgttatatagttggaatcgtacagtatgtagccttttcagtttggcttcttttacttagtaacatgcatttaactttcttccgtgtcttttcatgatttgatagttcattttttaaaaatgctgaatagtattccattatctgaatgtgccacagtttattcattcaccaactgaaggatatcttggttgcttctgagttttggcaattatgaacaaaagtgctggaaacgcccatatgcagatttttgtgtggacactaacttttcagctcttttgggtaaataccaaggagctcacttgttggatcctataagagtatgtttagttttgtaggaaactgccaaactgtcttcctaagtgcctgtagcattttgcattctccccggcagtgagcgagagtccctcttgttccatgtcctcaccagcatttcgcgtcgctcctctcggcccttctactaggtgtgtcgtggcatctcgttgtttgaatttgcatctccctgatgacatatgatgactttcacatgcttttttctaccatctgtgtaacttcggcaaggtgcttgttaaagcctttggctactttttaattgggttgttttcctatttttgagtttagaaattctttgtatattttagataagtcttataagtctgtgaatattttctttcagtctgtgacttgtcttattctcttggcagtgtcttttgcagagcagaagtttttaactttaattaagtccagtttatcaattcttacatggagtgtgtctttggtgttgtgtctagaaagtcatcaccaaacccaaggttgtctagattttctcctctgttttctttaggagttttgcagttttgccttttgcatttaggcctgtgatcctgtgaagggtaaggtctgtgtctcgtttcatcttcctgcatttggatgtccagttgttccagccccaagggttgaaaagcctgtcacttctccgtgggattgcttttgttggttgcctatgctctgaaaactgttcatattgcttccctgggaatttgacactatggaatttaaagctttactagcttcccttccccacccacccttccccagaaaaacaaacccactccctcttcttccctcagtcccctctccagtgtttttcttaccctcttttttgaaagaaaactttcagaatggtgcctttgtgaggtagctgtgaagtgagagtcccccctcagacttcatatgaactggagatggcagacgtggagtcttcagcctcacaggggtcgtgctcaaaacctagggtccaaacctgtggcatttaaccccaccgcactcaacactgtgtaatgacagaaacactgacagttctgagtgtaacgcatgacccaaagctgggttgggaccccagggcttctagagcagttgctcttcctccgaggactcaagtggtggagctgggctgcgggaacccttgctccccgcccacagcgccactgtgctgtccccactcaccaggcctccactgtcccagcgccgctggagtctttaggcggtggtgggggtggttgggttttttaagtaagacatttcttcattaaatgctatacgttaacacggcgttgaatgtctttatgtcgaataagattctacaaaaagtcaggtgtagatgaaaaatatcctagaaggaggtgaatctgtaggtcatatttgacccacagatatactttggcttgtatttcttttttctctcttttccttttctctgtccctttccctttctctctcacttgaactggttgccagcacttcagttagacttgacacagaacagctggatttctagcttccctttaaacccggctgcactgggcctgtgtggcacgtcctggtccccccgagctccatcccttctggcttacatccaccttgtccctgtaagtttgtttttaattttatttttgatttagtttgtgctttggcagtcccctagactagagcttatatcacgttctcgtagagacatgttgggtcacgtgtgacgctggtgtgtggtccgtgttgactggagtggagagggtgctgagagagcacgggcgtggaggccagagggccatacctggtgctgggtgggccgggtttagaaacaccttgggagagaagcctggtggccgcttcgtggcaggcccgggctgggactctttcgcccgccacgctcgccggctcgatcttgtgttcgcgcttgtttcttctctgtacgtgacatttgggctttcactgcctggtacggcgcctttcacgggagcgttcagtaaatattgagtgccgtgtgtgcacaggacctcatctgtttaaagatggttctgcatgtattcatcctgcatcatgctgccacgtctgccacttcattttttttttgttaaggcgatgcctggtgcattcaactgattgccccagatcagatgtttgtgaagggaagacatgggagtttagatagttttcggactgcagataagggtctcctaccacagtctctgctgatgatgtagacatggaatgttcagttgcaaaatatattgtttcagttttatcgctttacttatagtcttatgcagaagccttgaattactagcaacagcttttgttttactttgctaagcttaattctcaaaattattttgaaatgagtcaggcttctctaaaaggtgtttaggtttcagaattagtaaccattcaggactcattcataataattctctttttttttttaaccactaaagtcccagcttaatttccatgacaatttcagtttttaaaacacaaaacgtaatccttgaacttaattagatgaaaattggcaaagcctacacaaaactaattaggaaagacctagcagggacagtgggataaccatgcgtcctgagagtctggaccgccaccgtttatgctggtggtctcggcctgattattaacagacccactctttcatctcacaaggtcctgcttgggacagtaagttacccgtggagcctacctggaagcatatgagaatgtaatttaaatgtttaaaactcgtgactggctaccagcagttacggtctcttgacatttagacaacgcttactttctttgaaccacttttcaggacaaaagggtgagaaaaccacttctctgtaatgaactgaaacgctgcctaagtccgaatgggaagttgtcgctctgtagcagtgatggtctgtagctgaggctgaaccgtgtacgtgctgaaggacagtcatgtaaacagttaacaggaagaacgaggacttaatgagaatgttggctctccttgcagcggacaagaaggacatttgctaatgaagactgtggaaggtatttgttaaccaaagattagatatgggtagttgatggttattcccagctgggctagaagttcctgggaatagcgtgaccttggtattagcccctctcagattcactggagaatgacgcagagccctgaaacatctcacaggaagggagatggctttgctggagttgaaggatatggaggcactttttataacaaagattaagggttgtttcatggacagtggaaattaaatgaagtcatcagtgccactataagcatcttaagaaggtttctttgctgagttttttttaagcaaggaatactcttgtgagtattaagttaacctgtctagattgagttgtgttttcttctgcagtacttctaactttctgttttataatattcttctaggtgatgtgccaaattatagattattgaaataccttataataaaatcctcttaaactttgaatttggtactatcaaaatattctggagttttgtttgtttgtttgtttgtttgttttcttttttgagatggagtcctgctctgttgcccaggctggagtgcagtagtgccatctgggctcactgcaccctccgcttcccaggtgcaagcgattctcccacctcaccctcccgagtagctgggactacaggcacacgccaccatgcctggctaatttttgtaattttaatagaaacagtgtttcaccacattggccaggcttgtctcgaactcctgacctcaagtgatctgcctgcctcggcctcccaaagtgctgggattacaggcgtgagccactggcccggcccaaaatattctttataacaaaaatgtcattactttattcctggagttactaaaatgaactgttaagaatctcgtatttataactaattttatagaggagttggagattaagtttcacaggatagaaacagttaatagggacgtgttattgccctttaatgcttcaaatatagtttcagtcaatgaagatattgctgcagcttcagccatagcaggagtaggtgggcagaagaatgtcagagctgggcttcagaggatttgtgactcgttctgacatggtcacataagatctttgaattctttaccttgacggatcctctgtctagtacaatgcagtcacttttttgtgttttttgtctgtttgtttttgtttttgtttttgtttttgttttgacagggtcttgcactgtcacctaggctggagtgcagtagtgcgatcatggctcactgcagcctcgacctcccaggctcgtgatcctcccccctcagcctcctgagtaactgggaccacaggcatgtgccaccacatctggctaattttttaattatttgtagagataggatttcaccatgttgcccaagctcatcttgaatccctgggctcaagcagtcctcccgcctcagccccacaaagtgctgaggttacaggtgtgagccaccttgcccagcccagtcattttataaatgagaaaacttgagacttgatcaattcaagtagcttgtccaaggtcttacagctttattcttgaaattgttatattctaaactttcttccagagaaatagtagccttatttctgttacaagaaaattgcaatttagtcatgtgactatacgttttatttatttatttatttatttatttatttgagacagggtctcactttgtcacccaggctggagtgcagtggcacgatctcggctcactgcaacctccgcctcccagactcaattgattctcccacctcagcctctgaagtagctgggacctcaggcatgtgccaccacccctggctattttttttttttttttttttttttggtagagacaaggtttcaccatgttgcccagactggtctggaactcctggggttgcaggcatgagccaccatgcctggcctgactatactacttaagggtcagggacttcaacaatttcctgttgaatgcaggaaattgcctggagctcagtaattaaatgctacctgcgtgtttcctacttaatggcattctggtggtgagcagtgacgtagcccataatatgagggaaagcagggagatggttggagatgtaggcgttaaacgcttaatgaccagcatttctccttgatgtgcctagagcaaaatgattcagtttcatctcacccacagcatgcctcttaaatacgcatcctcaaagaaaaatgaaaggtaggaagtagggaaaacccaaatcacagcagagaaactggaaacttggtgaggttaaaaaaaaaaaaaaaaaaaaaagatatttcgaggagaacattgcaggggattcaaaagttcagtacaaatggccgccttgccacagaggcaaagattccatccagaagcactgagatctcttgatgtggtcacatgggagggctacctgggaaggcggggaagggggatggagggtgctccatggagggcgttcacagggaagggggatggagggtgctccatggagggcgttcacagggaaggaggatggagggtgctccatggagagtgttcacagggaaggaggatggagggtgctccatggagggtgttcacactcagagcaagggctggcctggaggtcccatggccctggagcctggtggggcccgtcagggcttccctaggttttccttcctgctccattcagaaatcacagatgatgtatgaatttctttcctaacctggctttaatatctcattgacatttttgctttgcattatatttcacatttcctgttcttaaagagctctaaagacagcatatttgatttctgcctctccatctcccattccacacgctgagggtaacaagaaaatgtttccctacctctacaccaaagccatttatgacaaggctttgtacagaaattggctgaagggcaccacccgaagcccatttgggcaggtcttggttaaggtggaggtactcgtccttacctgcgacagagtgtctgctcacctgttgcttaaacccgcatcaccctcttttagaaagggagagctatttccttgacgtgagtttagatttttttaaagatcattacaggtatgtgttccacccagtctgtcaggtaggaacttctctgtctgaattgtttatataccgtagcaacattaataaataataaattaataaaagtaactcctctgggacagagcaggggccaccagccagtctgggcgtagacttggctttattttaagttcactttctctcaggtgctccctcccccaagcatgtgcatgtgcaccactcacacacacctttttatcttacaacagatttctttttcattaaaaaaagaaaatggccgggctgggtggctcacgtctgtaatcccagggctttgggaggccgaggcaagcagattgcttgatcccaggagttcaagaccagcctgggcaacctggtgaaaccccatctctacaaaaaaatacaaaaattagctgtatgtggtggtgtatgcttgtagttccagctccctgggaggtggaggttgcagtgagctgagatcacaccactgcactccagcctggatgacagaaggagaccctgtctcaaaaaaaaaaaaaaattatatatatatgtaacacatttatttcaaacttgtagagtttagccggaaggtacttacagcaactttcactgtagtttaaaaccctcagtctgttttacagcttctaccagcctgtttagtcaatacttttctccatgttcacccccttagcacacacactctgtgaaagtaacaaccgtaggcagcttctaaaacactttgtgaaatggattcctgaaaatgtgtggggatgtgttgtcctagtgggtgtgtgagaagtagtcagtcatgtagaggcctcccgtgggggcccgccctccctgtgtggggtatggacggccaggaataaagtgtgcagtcacatttggtctagggagtaaaaaaaaggtgaccactatatcatctctccagagtagtatatattttctctttaaatatgctgctgatttttgcgttttaaaacacatcctggccagaggagcccagccttatccttgtatgccgtttaccatgtgtaacatatcgtgtctgtcatcatcagctgtttccttctgtatggatgtcattcaacaatttctccatacttgctctgtttaaagacctcacttgttatgaactcgatgtgtcaagcactgagctggactctggagatggaggcagtgggcacccacaccctcccccgtttgcacgtgttcccgcagctgctgcagggctgtccgtgtggtgcctccttgcatggtcattctggcccatgcgtcttgtttcctggatcctgtcatcttctttacagctttctttccttgctttagaggaacatatccttcagtagcttcctgggaaggaatgaatgcaaggtaaaattgagtcctgagtatctgacatcttttgctgttctcactggatggatagtttgggaagagaattctacactgagaataattttccactcctcccacttctgaaggcattgttcttcagctcccagtggtgttatctgtgtccggtgccatttccatttctgattatttgtatatgccctttttcctcctctgtggaaatttttagattgctttttcctgtagtttttatactggatacttttatactgtactttttatactggatacttagagtttaacccaggcacctgactcccttaattctggatccatttttttatattgttgttttccctcctgtgtgctttttgttcctagaatgaatacttttctctcctgttgtctggtttttttttatcgttatgatcttctagggatttcttcagttttatcttcaaactctactcctttgttttgctgtcttgtgtttggtttcaagggttttttcctctgattttcgtgtttatcacattctgttttggttgcactgtcttccctttgactatattgtagatttttgtttttgttgttgtgtttttcttctgttcactgcgttgtttctgttccaccaagggttttgcttttgttttgttttattttcatcattcccattcagaaccctttttcagctgccctgatgatccttgactgttgattctcattaagagtgaagcattgagaagctgaccaggagctgtgtagcagaggcttttaaaactagtgtctttgctgtaatgatccagctttttgggtgatgtttttgttggcagactctaggtatctatggtactgttcaattgatccaaaagactcttccggtttcctgcttggggtggggagtggaataagttttctgggacacaagtgggatatgagggcagggtcctgctcaagtcccccaatttccatttccccattatcagacttgcacctcaccaccttgtgcttgggtgtaatttctggaaaaactaaacttcagagttatgtatttatcaaggaagtaaacccagaggactaagatgcagcattcattcataactgtataaaacaactgtgatacatactctactcctgtagtgacttcatagctgcctcctgttgccactgtggtgagctcagctggtgcaaatgtaggcttgaaatgctgggtgacactaatcatccccacctgaacagttcatcactccagaaaattgcatattgcagtcaaaagcgatctcttgcagttcttatatttttcatcagatttagtgcaatactgtgaacctcgaataacaccgtgggacccatatgaagtaccactaaccatgctgaatggttcccaagaaacagaaaagtcataatattacaagaaaaagatgaattgcttgctaggtactgtagattgaggtctgcagctgcaatggcccatccatttcagatacagacggttgattttgtaaacagacaatgtaaactcacagtattaatacatacagtgctgtaagtgtatttactcttccttccatgccattttcttaataacattttcttttctctagcttcctttattgtaagaatgcagtatataattcacacaacatgcaaaagatgtgttattgattgttattgataagacttccagtcaacagtaggctattagtagttaagttttttaggagtcaaaactcatacatgggtttttgactgcatgaggagtcggcactcctaacccccacgtcgttcaaggatccactgtatttgggaagagaggagaaaatcatgtcagttccaccactcctgttcagccataagtctccaatgtgtgttctaagaatacctctgtgctactgtcttgaagcactgttgagggaggaacagaattctgcaagcagacccatggggaacctgtggcatgacccagtggggctggagagagaagggtcggagatacatggggagatggaattggcagcacgagcttcctgcagggcaaagaaggaacagcacatgcttcagactgttctcacctcactgtagaagacagcttgtaaggccaaattaatgtgtgtttacactcttggaaatggagagaccttccacaaacgatattatggttcttcgtgttcattgttaagaatttggaaattatgagcagatgaaatggaaacaatttatacttgaaacaaatacatgtagaatctctgccggaattgtcatctagctttttatctcacagcagacagtcatgactctgctagctctcagttaggcacattgtgggcttgtgggtctctgccgtggaagagccttccttaccatgagatcctcaggtgcagtcagcggtggggtctggtggcctgcgcagttacttaagtcacgttacaaaggctggccttggtggaacaggaagcatggcttcccagaccctgggagcgtcttctgaggcaccgtagcaggtccttgtaactgctgtgcctccgagtgccccaacaggattgtaaaatgactatatttgcttcaaggttttatggcctgcaaataacctttctcaacctttcttctctttgagtccccacatgacatttgccaccttgtagccctgccgtttgtacccaagaatcagcccagctagaaagtgaacagtaaggatgctttgggcaggaagtgcatcaggcttcttttgttgcgacccacagaaggagcaaagtaaaaagagagataagttaacgtggttcatccaagccttgtggcagggcctttatcttcatgttgtttgtatctggcccgcccatcagggcttgaaggagtcccggtgccagtcgcctactgccttctctcagcaagccccaggttacttctttgcttcagtttatttaaaacaagaatttgagatttgctttcctgtagttgatagtaaagttgatagtaggtagcagaaggggcatgtaaaattccatataaagtgtgccctgtgtgctgcatgggggtcagagtcggagtttctcctcctagcctagggaggccctgcttcctacccccacagaaaacctcaccaccttttctaattaattagaaaagtgtgccacagtgtgggagtgatttcagtggtaagtccatgcgtgcacctgccatgtggggagcataagcggtgtgggaaggaaagttggaaacagcggcggcactttggaggacctgtaattctgctctaattcttgctctaagaccggactcacgggtgcccaggaggtagaggttagccctcatcagaccccagctctgtgcggggcctggcaggcatgccagctccctgtttactttttaccttatgagaaaaagaagtaaggtataaaagtgcccatttatatttctctactattaaacggtagttgcagtggctcaggaaagagtcagcatatgattgtccagaggcaaataaaccagtcagccagaatgcgtgtcatcccttaccaagagttagtctttaacaatatgaacaaaaaacaaccatgaacttgaaagaaacaggactaatttaccagataccaacctcaaatgctttcactgaacattttttgcaaactattactctgcattccaacatgctttgtaaaaacgttcatctccttgcccagatgtactgaggcattaggcacattcccttcctaacttgagggaacccattttggctgatggcccgtaagcttatgctgtcccaaaacctgcgccacggggcggaggcagggttggtggaatggtgagccctgtgcgtcctgcatgtttcccatctgccagcattttctgatcccccaggcaccaagctccgtgctggtgccggagaccccgtgctgagcaagcaggcccgctcctgcctccacagaagacctgggagaggggtaccttcctcgtacgcaggaggccagcagcgtgaagagggttttcagcgtgtgcttttgcttccagagacctcagcagagccttgattcatccctgcagcatcctcgcagggccaggccgcctcctgcctctgataggctttcccttcccttagctccctggaagcagggtactccttcgctcaggttgtttgcctggagttcttctggctctcaggaggaagtttattcccacagatagaagccgcaggatctgctattcaggtcttcagccagggacgcatgactctgtgggtccctttcacaggcgtagtgggacgggggtggctttatctttcaggcatgctcctgtggtgcactgtgatctcaattttatatgttttcattatgggacaactttttcataattctgtttgcctgtgaaagtatattggccaactttggttattaacccttacttccttaagcagtttctatctgtgaattcttctaaccacattggactgctgttgatcgggccttatctagggccttttgtgtgctgtggtccattcagaaacatttctaatatttgcattttctttagcatgtgctggcactcaatcatacaatactaaatttgtgatctcttttttttcctgtaacagatgcagcagcttttttatgagaattacgagcagaacaaaaaggggtacattagagatctccataacagtaaaattcaccaagctatcacattacaccccaacaaaaacccaccctaccagtacaggctccacagctacatgctgagccgcaagatatccgagctccgccatcgcacaatacagctgcaccgcgaaattgtcctgatgagcaaatacagcaacacagaaattcataaagaggacctccagctgggaatccctccctccttcatgaggtttcagccccgccagcgagaggagattctggaatgggagtttctgactggaaaatacttgtattcggcagttgacggccagccccctcgaagaggaatggactccgcccagagggaagccttggacgacattgtcatgcaggtcatggagatgatcaatgccaacgccaagaccagagggcgcatcattgacttcaaagagatccagtacggctaccgccgggtgaaccccatgtatggggctgagtacatcctggacctgctgcttctgtacaaaaagcacaaagggaagaaaatgacggtccctgtgaggaggcacgcgtatttacagcagactttcagcaaaatccagtttgtggagcatgaggagctggatgcacaagagttggccaagagaatcaatcaggaatctggatccttgtcctttctctcaaactccctgaagaagctcgtcccctttcagctccctgggtcgaagagtgagcacaaagaacccaaagataaaaagataaacatactgattcctttgtctgggcgtttcgacatgtttgtgagatttatgggaaactttgagaagacgtgtcttatccccaatcagaacgtcaagctcgtggttctgcttttcaattctgactccaaccctgacaaggccaaacaagttgaactgatgagagattaccgcattaagtaccctaaagccgacatgcagattttgcctgtgtctggagagttttcaagagccctggccctggaagtaggatcctcccagtttaacaatgaatctttgctcttcttctgcgacgtcgacctcgtgtttactacagaattccttcagcgatgtcgagcaaatacagttctgggccaacaaatatattttccaatcatcttcagccagtatgacccaaagattgtttatagtgggaaagttcccagtgacaaccattttgcctttactcagaaaactggcttctggagaaactatgggtttggcatcacgtgtatttataagggagatcttgtccgagtgggtggctttgatgtttccatccaaggctgggggctggaggatgtggaccttttcaacaaggttgtccaggcaggtttgaagacgtttaggagccaggaagtaggagtagtccacgtccaccatcctgtcttttgtgatcccaatcttgaccccaaacagtacaaaatgtgcttggggtccaaagcatcgacctatgggtccacacagcagctggctgagatgtggctggaaaaaaatgatccaagttacagtaaaagcagcaataataatggctcagtgaggacagcctaatgtccagctttgctggaaaagacgtttttaattatctaatttatttttcaaaaattttttgtatgatcagtttttgaagtccgtatacaaggatatattttacaagtggttttcttacataggactcctttaagattgagctttctgaacaagaaggtgatcagtgtttgcctttgaacacatcttcttgctgaacattatgtagcagacctgcttaactttgacttgaaatgtacctgatgaacaaaacttttttaaaaaaatgttttcttttgagaccctttgctccagtcctatggcagaaaacgtgaacattcctgcaaagtattattgtaacaaaacactgtaactctggtaaatgttctgttgtgattgttaacattccacagattctaccttttgtgttttgttttttttttttacaattgttttaaagccatttcatgttccagttgtaagataaggaaatgtgataatagctgtttcatcattgtcttcaggagagctttccagagttgatcatttcccctcatggtactctgctcagcatggccacgtaggttttttgtttgttttgttttgttctttttttgagacggagtctcactctgttacccaggctggaatgcagtggcgcaatcttggctcactttaacctccacttccctggttcaagcaattcccctgcctttgcctcccgagtagctgggattacaggcacacaccaccacgcccagctagtttttttgtatttttagtagagacggggtttcaccatgcaagcccagctggccacgtaggttttaaagcaaggggcgtgaagaaggcacagtgaggtatgtggctgttctcgtggtagttcattcggcctaaatagacctggcattaaatttcaagaaggatttggcattttctcttcttgacccttctctttaaagggtaaaatattaatgtttagaatgacaaagatgaattattacaataaatctgatgtacacagactgaaacacacacacatacaccctaatcaaaacgttggggaaaaatgtatttggttttgttcctttcatcctgtctgtgttatgtgggtggagatggttttcattctttcattactgttttgttttatcctttgtatctgaaatacctttaatttatttaatatctgttgttcagagctctgccatttcttgagtacctgttagttagtattatttatgtgtatcgggagtgtgtttagtctgttttatttgcagtaaaccgatctccaaagatttccttttggaaacgctttttcccctccttaatttttatattccttactgttttactaaatattaagtgttctttgacaattttggtgctcatgtgttttggggacaaaagtgaaatgaatctgtcattataccagaaagttaaattctcagatcaaatgtgccttaataaatttgttttcatttagatttcaaacagtgatagacttgccattttaatacacgtcattggagggctgcgtatttgtaaatagcctgatgctcatttggaaaaataaaccagtgaacaatatttttctattgtacttttcgaaccattttgtctcattattcctgttttagctgaagaattgtattacatttggagagtaaaaaacttaaacacgattcataaagtttttcaagttatttgagggaaatgcttctgtggaccgcagcttgggagtgaaacgaaacccggtttcaagtgcttccttccgttttttcctcagatgagctcgtccttgttcctcatcaactcgctgaccccacgttcttcaaaacaaaggtcttcaaaccgggcctgggccgcgtctggctcctggatagaaatgtcccctcccaggccccatagaacctgcattttaacaactgcctggcgtggggctgtggcacaacttggggttccaggatcaatctagttagaggataaatcagcacagttgcaatataacccaagagtcaaaagaagtgagatctttgatgccaaggtagcaagctcgtgtgggcaagcattgcccccgggataggtatatttacagtgtaatgacagttaagtcccagcataatgacattgcgctcacagcaagaattgccgtaattcagcctaattgccatttactctgtgggagtgtttagttttttcttggagaaaaagcagagacatttttattcttcgataaggaagagcataatatgcatcttcatgacaaagtattataaacgctttcctatttaccatagtgacaaactggggggatttgggacgtggtgtgagtgacacgtttgagtgtgcgtccagaatttcaatgacccttggtgaaacctgccatttccttccctgctcccactcctgatcaggtctgtccctcttcctgatagcagtgttggtgttcatggaagtactgcctcccttccaggctccgtttccagaaacgcggccggacccctctagctccccgccctggcagtggcgtgtctgcactccgcgtgctggcctccaggttccactctcctccgtcacctggtgctgttcttttgcccagagggtggactcggcagttccacaggcacccgggccctcctcagcctggctgctgtccctgcgtctatcatcccccgttccacagggcacctcctccagccgctgcgccccaagtcgtgggggcatccgtgtctgcggccctgccacacactttccctccctctggacaacctgactgtttcccaggacgcagctaaaacaccccactgtccgctccgctgccaccctggacccttctgtgggatgtgacacagctgggcctccttctgtgaccatgtggcagtatctgtctcactagagcccctcaaggaggcctggggctcttgttcccgcccgtcccctggcgtgttgggaaccacactgccctactccctcgagcgccctctccacatgtgcctcctgccaaaggcgtgccctcccgtcctccgcactgagtactcctgccagtgcacaggctgagacctgcagcccctgctgggcctggaactgatcccttccccctgaatctctggaggcttcctgcttaacccttccactgtggcttcctgctttgtgactcctgtggacagtatgttaaaatcgtgccgtgtaatatggctgaagaagaggagaagggtacaatcacaaaagcatgaaggggaacctccctccttcctcccagcaccagctcaggacttcccacaaacggccaccaagtttgtcctggccaggaaggcagagctgtaggcatagatgcatagacaacatttttgaactttgcacacaaatgagggaattccttctctcttgggcatgaggaccctggcggggagcctcagggcagaagatggatgtggcttcatgacccagtgaagtgtgtggggagaggttgccagtgggatcccggctttgtggttggatgccagggaccctgcatggaatggaaccaggagagccttatggggcagacagcactggcagactaggggaacctgcagcttgcttccagaaggtgggtcaacttccctgcactgctgttctgggctgggatgagaccggagcgtggatgtggacctagcatcccaaggccttctgtggagacgccacgtgtcacaaggtcatgagacggtccctctttgctgcaaaagcaggcaggcctcaggagccaaggtggaacattccctccactccgggatgtgagggccagggaggagggcgcttgtaaactcacagcttgggccctttgacagttcagataatggaaggaactctgaccctcggatgtctcatcttattcccgccccagccccaacacgccttcatggccctgctgatgagttattgattcctataggcaaagtgtctgagcccctccctgctatttcacaaaggcatcaaagcctaggccctgactgagcccagaagtggacacgggtttctttccccccagcccagcaggctcagagcgctcactggccatctacatagcagttgacctgagcaaaatgattgtcatatttgcctccttgccatgcacttgaaggatcacctagaggtctgggtgttcctgcagccacctccattcactactcagtgtgttcaccgagtcaaatgtacacactagtgagttgccagcaccacactccatctcgtaaggacaacacttaggttatgggaaccagcggctttcagaggcattctccctgctgttagggtctcgtttctcaagacccatcctccaggaaggtgacacacctgcctactgcactgaggggcgcctgcccaggccccaggtggcaaggtttcctcttgtgccctcatcacggaggaagccaagggccagccctccctgtgcctgcacagacgcccgccctggggaattaggctgcattactgccgtataacttgctgtaatctctgctgcaaaggagcttatgtgcttcagctggaggcggggtggtctgtcagctcaagcggctgcacagggctgctacctgccgcggtgggccccgctgtgcttgctaaacccttgaaagatggccccttctgtcctgcttgaaatgaaaatgcttgcaccaaatcttcttagtctaacttgttataaatgcaacgataatgtaaaggttacaatgcaatggatcaaattacagtaactcatttcgaatggcttccagtagaaagcagatgcttcagagttcggtttggttttctgcaggggtgtaggggtgagggagggggtgtagattttcaccggaaacgatcgcgtcaaacagattaggggctggcttgtcatcagtgcagttaaaccacttaatgtcttttgtcagatatttcttcatatgtttaatttaccattcatgatgtttcagtgatgagggtcttcatttcttactaatacaggcaaaaatgaaatgtcctttaaagaacattctagctacatttcctttaaaactgtaagagtagtcggttatgcctgaccgctttttaatgagaaaatataataagaaattgatcaaatcacttaatagcaaagtggttgggcaagctctggaaaatgcttaaatgaagctggcttatctgtaatgaatttctctccatcacaattaagtcggcgatgctcccaggctgccgctgcccccttcccctcgccagcttgccacgactcatccccttggttcacgccacagccctccgcatgcctcgctcgctgctccacgtgtgaccctactggagaaaagaaatgcttctagccaagccttagggctaccttcagattcattcattctgaattaagtttgggttgagttttaggcaaaagctcagaaaggggaatctcatttatagcctcagaagccctgggcacaccccgaggtctgaagctagaaacgaatcatttctaaaagtgcactttcaaatgatcccattagtgttgtgaaggaagcattttggatattgttgggggtttttttgttttgtttttgtttttgtttttttctagagagagtctccctctgttgcccaggctggagtgcagtggtgcaatctcggctcactgcaacctccacctcccaggatcaggcgattctcgtgcctcagcctcccaagtagctgggaccacaggcatgtgccaccactccaggttaatttttcatatttttatgaaaatgagatgaggtttcactatgttgaaaccctctacgggatagagatggggtttcactatgttggccgggctggtcttgaactcctggcctcaagtgatggatctgcctcaacctccgaaagtgctgggattacaggcatgagccactgcacccggcctgcagtttggatttttgaacggattctatttcttccgtggtaaataacaatgtaactgcagcagaggatacccatacagggaagcagagaagggaaaggaaagaccaggcccttcctctgtaccaccctgttcccactctgccgagttcccgtcaggggctgtggtaggtaccgtttgatgtagggtgcacgtaccatacaatttgacatcttgctttttttccatccatttaaaacacattggtcctgtgagactgcccgggaaggctgccttctctcctacaattgggcgtctccctcctgctggccatctccagcgtcccgtggttccatcctgagtcacaggatgcagggagcatctttccacttcacccttttcgtactttggatcatcctcttccagggctgagggactttgggacttggccatttctgacataacactaagtcgtctggcattttgttttatttggtcaacgttgacattttgaacctactagctagttccaataaaacctttttaaaaataagcccgaaaagtgaaatgacctttaagaaatactgtgagaatattgcacagtgtcttggatccctcatcctgtgagaatattgcacagtgtcttggatccctcatcctgtgaaaatggcaactccgcagacccaactctatgactgcaaagcttgagtcaggacaaagtgagacagatttattgatgactcagggagcgagaagaggcgcgttccagacagagggcctgtttgggaaagaggtacactccactcccaggaagctggcgctcattccaagagatgggacaggcaggggcgcggagtggaagtgggtagcctgagataagagcagctctttccagacttggtgaggcagcagaagcgctggacgagatgtggacatgaccagaggcaccgggcctccgtttgggcagccaggagtgatttcctagtgggaaaagtatacatttgcaaacagatgggaatacatttggatatgcatagatggaattactaaccacctttacctatgttctaggcaagttttgaagattgatattatattttatataatgtcatatagaaaatatatattggttatgatttatcattatatggtttctgtgctacttggaaggcacggcatgttattagatctgaagataatgtttggctgtggggtggcctggagtccaggggcctggggacgctgtgaatgagcacttttgtaggagcatcaggtgatgaagggaagacgcggcacatctcatggcagaaagggcagcagcagtgagctgggggtttctgagagagggtcgtgggctggaggagagcagttgttaacaatacatgccttcctggcttccccagggctagagcagcccaaaggtctgaggcagctccccacacagcccctgggtaatgagcagttaggataatgattcatgggccttctttaaaattagatttggggatgggcctttctaccaagaggatgtgccttccagcaggaactcagcagcccggcttctcgaaggtgggtgtcagcgcactcaccatctgggccgcatcctcaggaggaggtgacatacgtgttccatcagctcagcgggagaggatggccctgtgcagccccagctggtttcccagggtccaccagcagctgctgggcagccttgactgctctgcctgcccagaagtcgggtctctgctgccaggccttccctgaagcatgcttggtttccacgtcacacctgatctggggccctggcttaatgccctgtggtgtcatctcaccgccttccccctgagctgagggctggtgcagtggcctttccctctgagtcgctgctgttgcagccaaccaccctgagtggctttgggaggtgagtttgtcacagaatggctccgttttgccccggtgccctgtcccttttcacccacacaagggccctgtccgcacgcggctccgctcgcccgcctttcctggcctcatggatctgcctttcttctgcctccacagcagtcagtttcaagttagaaggaaaatatccacaggccacaggatttgggagaaaatgggatgcatatggacttttgtaggtttgggactaaaacactgcacattgtcttaaaatgaattgtctgagaggatgtcgaattgccaactttgaggacagctgctgtgcaaattgaatccatttgcagattttgacatcagaaacacaattcctatttgggacaagacctcactgtgtttggcttctgaatggtgagcaggtagctgctatggctaatgtcagggtttcgccaagctgcagccacctcagtgagcactaaaaccaaatccaaccgtgctgcagtgattcgtgtgagcccccggcagaatgtccctctgcaggagtcttgatgcttgaatatggctccagaagaattaactgaattgtacatcctgaagtgacagggcaggcctgggcttgggggcagagtgagagagagtgattctgttatactgtctgatattttcctgtatcccactgtacacaccaacctatatgtaaaacccatgagagactagggtaaagggcagtgaatacaaataccaagacccagattagttgtgagctgtgtgcttggcactgtggaaggagaaggggcctcagaaccaggctggcctgagttggagtcagtggtggtctgaagccagctagggactcatgaaaatggatccccagccccacattcagtgacatcatgctggccactgaaattggctgaggtgggagtatttacaccacaagaaatggcacatgcttcaaagcaggcttttttttcttttaaattggacttaccagcacagcattggtttggatcaactccacagacggttggccaggccctgtgccagtgtgcctgcagctgtgtgaccttggacaagttccatgtgccagagctcagcttcctcctctgcaagatgggcatagttaccagtaactcccaagactgatgagagaattgacagaagctggccctcctcctgtcacttcatttcagtttggtgtcacctccccactatctccccacctggtagcatcagctgctcagaactccttccagacccacatcccgtgagtcaccaggtcccacaaaccctcctagataaggtcctaggatgctcctcccaccccctcatctcttgacaaagctgcatttacagggcatgccctgcccatttcctgctcctccagtccagcctcttccttaaataaaaaagaaaaacaaatcttatctgggctctcctgcttagactgaaccggttcaggcccaggcttcccggcttaactgggctgaggctcttcttgaccggcatcgcctgtatttctgacttcatctgttctccacagcccccgccccatcaccacagccccccagtcactccctcctcctcctgaagaggaagccaggcaatcacttcttggaagccacgcttttcccccggggcttcctgtgcctggaatgcccggccctcactgccctgggcgcacttcctgattcgggggcaatgtgaccttctctctgggcatgttaggcagggttttagccgtgcctcccccaaccctcagcccgggcccctttccacctgccatgattggatctcactcccagctggggactgtgtcttgatctactgggtgcctgctgccccaccaggctggccaagcccatgcacacccagctttgtggccccccctggggtctggtaggttatggtgtgcagccaagattagttccccttcacttctgttctagcctctcagctgggtttgccaaaggaaaataacagctaaaattagatatttctataaagacagcctgggacattcagtttttaggtgaaaacaatcaaatagctttcaatgtaagaacaagaacctgacttcacagacacggaatgctttcactcttgaatcataaagttaatatttacgaaccattactaagtgccagggacttcatataagttacttcatttactgctcccccgtctctgtgagatcagaattcttgacctcagtttacagatgaggactggaaggtcagggagctcaggtgacgtgcccaaggtcatggagccaataaatggcagatccaaaattcataccagatcagccttattccaaaatccatgttggcgggagaggggaaatgcagtgccagagagatttaagatcctcaatttagactgctggtagggtaccaagaaatggcagctctgtgaataggatgttttactgtaaagctcgtaaatagtttacctgtttaatttttctctgccttttaaaagtttggcttttttaagattccataaacacactattcaatatagatgcagtaaaatcgtttttcttcaaaatacacagtattcagaagattctagtttcaggaattgtggagtagctcatatcagactactcctcccacagatagcaatgataaactatggacaaagtagcaaccaccaggacaaaaagaaacaactatttgaaggccctggagaataacaaagatcaggtagaaactggagagaatttcatgcttgataaaaaggaactgcattgggtgagatgcatgttacttatacggccccttcctgaagggcactttctaggccacagcacttaggagttagaactcaaaaagttccattattattggcttgagatcttgtaggatggggtttagagctgccagagtagctggaagtggaggagggaaatcccaaaaagaagggagactaaagggtgggactcccaagtctgcatattaacccccttctcagtctcaattaactcctaaccatgtttgcctgggggagacttcaaggaacccagaagaaagtaattgctggggggctggaaaaagccaatcagagatttcccatagcaagaaagtcagagtttggagttagagtcccactaagttatatggggcttcataaacacctttggatttccactgaaaccccaagagggttatatattaggaacaaagactaggtcttatatttatctaagaccaatggcaaaaacaaaacagaccttccctaataaagtgtgaaaaccaagcctccacaaaaatcaagatgattagttaggaatttaacaaaaatcggtactcttcagaggaagataacataatccagagcttatacaacagatcatctatgatgttcagaattccttcttagtcaagcctttcttagtgccttgggcagagttttagtcatagcttcccgtcctcactctggactctgcatcaaaccctgtaaattctagcacttcttgccaagatctgctggttgtctggctgccatgcaagactattaactttttatcagcaggcatgtgaagaaacagggaactgtaacatatagtcaagagaaaaatcaggcaatagaagtaaaccttgagatgaaccaggaggtcaaattagcagataagaactttaaaacagctctgataaaaatagtcaaagacaacctctgctttccagtttcaagagattctcctgcctcagcctcctgagtagttggggttacaggcacctgccaccacgcctggctaatttttgtatttttagtagggacagggcttcaccatgttggccaggctggtctaggactcctgacctcaggtgttccacctgcctggcctcccaaaatgatgggattacaggcatgagccaccacacctggccagactttaaaactgttt

SEQ ID NO: 585 - DNA, 4545 bp, Homo sapiens
ggcgagctaagccggaggatgtgcagctgcggcggcggcgccggctacgaagaggacggggacaggcgccgtgcgaaccgagcccagccagccggaggacgcgggcagggcgggacgggagcccggactcgtctgccgccgccgtcgtcgccgtcgtgccggccccgcgtccccgcgcgcgagcgggaggagccgccgccacctcgcgcccgagccgccgctagcgcgcgccgggcatggtcccctcttaaaggcgcaggccgcggcggcgggggcgggcgtgcggaacaaagcgccggcgcggggcctgcgggcggctcgggggccgcgatgggcgcggcgggcccgcggcggcggcggcgctgcccgggccgggcctcgcggcgctagggcgggctggcctccgcgggcgggggcagcgggctgagggcgcgcggagcctgcggcggcggcccggcgggcggagcggcgcgggcatggccgcgcgcggccggcgcgcctggctcagcgtgctgctcgggctcgtcctgggcttcgtgctggcctcgcggctcgtcctgccccgggcttccgagctgaagcgagcgggcccacggcgccgcgccagccccgagggctgccggtccgggcaggcggcggcttcccaggccggcggggcgcgcggcgatgcgcgcggggcgcagctctggccgcccggctcggacccagatggcggcccgcgcgacaggaactttctcttcgtgggagtcatgaccgcccagaaatacctgcagactcgggccgtggccgcctacagaacatggtccaagacaattcctgggaaagttcagttcttctcaagtgagggttctgacacatctgtaccaattccagtagtgccactacggggtgtggacgactcctacccgccccagaagaagtccttcatgatgctcaagtacatgcacgaccactacttggacaagtatgaatggtttatgagagcagatgatgacgtgtacatcaaaggagaccgtctggagaacttcctgaggagtttgaacagcagcgagcccctctttcttgggcagacaggcctgggcaccacggaagaaatgggaaaactggccctggagcctggtgagaacttctgcatgggggggcctggcgtgatcatgagccgggaggtgcttcggagaatggtgccgcacattggcaagtgtctccgggagatgtacaccacccatgaggacgtggaggtgggaaggtgtgtccggaggtttgcaggggtgcagtgtgtctggtcttatgagatgcagcagcttttttatgagaattacgagcagaacaaaaaggggtacattagagatctccataacagtaaaattcaccaagctatcacattacaccccaacaaaaacccaccctaccagtacaggctccacagctacatgctgagccgcaagatatccgagctccgccatcgcacaatacagctgcaccgcgaaattgtcctgatgagcaaatacagcaacacagaaattcataaagaggacctccagctgggaatccctccctccttcatgaggtttcagccccgccagcgagaggagattctggaatgggagtttctgactggaaaatacttgtattcggcagttgacggccagccccctcgaagaggaatggactccgcccagagggaagccttggacgacattgtcatgcaggtcatggagatgatcaatgccaacgccaagaccagagggcgcatcattgacttcaaagagatccagtacggctaccgccgggtgaaccccatgtatggggctgagtacatcctggacctgctgcttctgtacaaaaagcacaaagggaagaaaatgacggtccctgtgaggaggcacgcgtatttacagcagactttcagcaaaatccagtttgtggagcatgaggagctggatgcacaagagttggccaagagaatcaatcaggaatctggatccttgtcctttctctcaaactccctgaagaagctcgtcccctttcagctccctgggtcgaagagtgagcacaaagaacccaaagataaaaagataaacatactgattcctttgtctgggcgtttcgacatgtttgtgagatttatgggaaactttgagaagacgtgtcttatccccaatcagaacgtcaagctcgtggttctgcttttcaattctgactccaaccctgacaaggccaaacaagttgaactgatgagagattaccgcattaagtaccctaaagccgacatgcagattttgcctgtgtctggagagttttcaagagccctggccctggaagtaggatcctcccagtttaacaatgaatctttgctcttcttctgcgacgtcgacctcgtgtttactacagaattccttcagcgatgtcgagcaaatacagttctgggccaacaaatatattttccaatcatcttcagccagtatgacccaaagattgtttatagtgggaaagttcccagtgacaaccattttgcctttactcagaaaactggcttctggagaaactatgggtttggcatcacgtgtatttataagggagatcttgtccgagtgggtggctttgatgtttccatccaaggctgggggctggaggatgtggaccttttcaacaaggttgtccaggcaggtttgaagacgtttaggagccaggaagtaggagtagtccacgtccaccatcctgtcttttgtgatcccaatcttgaccccaaacagtacaaaatgtgcttggggtccaaagcatcgacctatgggtccacacagcagctggctgagatgtggctggaaaaaaatgatccaagttacagtaaaagcagcaataataatggctcagtgaggacagcctaatgtccagctttgctggaaaagacgtttttaattatctaatttatttttcaaaaattttttgtatgatcagtttttgaagtccgtatacaaggatatattttacaagtggttttcttacataggactcctttaagattgagctttctgaacaagaaggtgatcagtgtttgcctttgaacacatcttcttgctgaacattatgtagcagacctgcttaactttgacttgaaatgtacctgatgaacaaaacttttttaaaaaaatgttttcttttgagaccctttgctccagtcctatggcagaaaacgtgaacattcctgcaaagtattattgtaacaaaacactgtaactctggtaaatgttctgttgtgattgttaacattccacagattctaccttttgtgttttgttttttttttttacaattgttttaaagccatttcatgttccagttgtaagataaggaaatgtgataatagctgtttcatcattgtcttcaggagagctttccagagttgatcatttcccctcatggtactctgctcagcatggccacgtaggttttttgtttgttttgttttgttctttttttgagacggagtctcactctgttacccaggctggaatgcagtggcgcaatcttggctcactttaacctccacttccctggttcaagcaattcccctgcctttgcctcccgagtagctgggattacaggcacacaccaccacgcccagctagtttttttgtatttttagtagagacggggtttcaccatgcaagcccagctggccacgtaggttttaaagcaaggggcgtgaagaaggcacagtgaggtatgtggctgttctcgtggtagttcattcggcctaaatagacctggcattaaatttcaagaaggatttggcattttctcttcttgacccttctctttaaagggtaaaatattaatgtttagaatgacaaagatgaattattacaataaatctgatgtacacagactgaaacacacacacatacaccctaatcaaaacgttggggaaaaatgtatttggttttgttcctttcatcctgtctgtgttatgtgggtggagatggttttcattctttcattactgttttgttttatcctttgtatctgaaatacctttaatttatttaatatctgttgttcagagctctgccatttcttgagtacctgttagttagtattatttatgtgtatcgggagtgtgtttagtctgttttatttgcagtaaaccgatctccaaagatttccttttggaaacgctttttcccctccttaatttttatattccttactgttttactaaatattaagtgttctttgacaattttggtgctcatgtgttttggggacaaaagtgaaatgaatctgtcattataccagaaagttaaattctcagatcaaatgtgccttaataaatttgttttcatttagatttcaaacagtgatagacttgccattttaatacacgtcattggagggctgcgtatttgtaaatagcctgatgctcatttggaaaaataaaccagtgaacaatatttttctattgtacttttcgaaccattttgtctcattattcctgttttagctgaagaattgtattacatttggagagtaaaaaacttaaacacg

SEQ ID NO: 586 - protein, 788 aa, Homo sapiens
MARRRAWLSVLLGLVLGFVLASRLVLPRASELKRAGPRRRDEGCRSGQAAASQAGGRDRAQLWPPGSDPDGGPRDRNFLFVGVMTAQKYLQTRAVAAYRTWSKTIPGKVQFFSSEGSDTSVPIPVVPLRGVDDSYPPQKKSFMMLKYMHDHYLDKYEWFMRADDDVYIKGDRLENFLRSLNSSEPLFLGQTGLGTTEEMGKLALEPGENFCMGGPGVIMSREVLRRMVPHIGKCLREMYTTHEDVEVGRCVRRFAGVQCVWSYEMQQLFYENYEQNKKGYIRDLHNSKIHQAITLHPNKNPPYQYRLHSYMLSRKISELRHRTIQLHREIVLMSKYSNTEIHKEDLQLGIPPSFMRFQPRQREEIWEFLTGKYKAVDGQPPRRGMDSAQREALDDIVMQVMEMINANAKTRGRIIDFKEIQYGYRRVNPMYGAEYILDLLLLYKKHKGKKMTVPVRRHAYLQQTFSKIQFVEHEELDAQELAKRINQESGSLSFLSNSLKKLVPFQLPGSKSEHKEPKDKKINILIPLSGRFDMFVRFMGNFEKTCLIPNQNVKLVVLLFNSDSNPDKAKQVELMRDYRIKYPKADMQILPVSGEFSRALEVGSSQFNNESLLFFCDVDLVFTTEFLQRCRANTVLGQQIYFPIIFSQYDPKIVYSGKVPSDNHFAFTQKTGFWRNYGFGITCIYKGDLVRVGGFDVSIQGWGLEDVDLFNKVVQAGLKTFRSQEVGVVHVHHPVFCDPNLDPKQYKMCLGSKASTYGSTQQLAEMWLEKNDPSYSKSSNNNGSVRTA

SEQ ID NO: 587 - DNA, 121129 bp, Mus musculus
  misc_feature (1)...(121129): n = A,T,C or G
ctgttaaatgtgtgacaaacattagaaatgtgtctcgttggtgaggacatacttgttcatgtgagcaggttccgtcattgtttccttttacatgtctgactggtccacaagagcaggatttctgttcctcccattatgaccagagaaggattcagaatttttctgagtaatttcagaggtggctcactgtcttagtcagggtttctattcctggacaaaacatcatgaccaagaatcaagttggggaggaaagggtttattcagcttacacttccatactgctattcatcaccaaggaagtcaggactggaactcaggcaggtcagaaagcaggagctgatgcagaggccatggagggatgttctttactggcttgcttctcctggcttgctcagcctgctctcttatggaacccaagactgccaacccagagatggtcccacccacaatgggcccttccctcttgatcactaattgagaaaataccccacagctggatctcatggaggcacttccccaactgaagctcctttctctgtgataaccccagcctgtgtcaagttgacacataaaaccagccagtacactcacgttatgtattttagtggaatttaaggtcactatcgaaggctacaaggagaaagaacaacagacaatggtactggaattgtggacatcagtagttgttcactgaaagctttgggagatgtttgtttgtttgtttttaagatttatttatttcatttatatgagtatactgtagccgtcttcagacaccccagaagagggcatcggatcccattacagatggttgtgagccaccatgtggttgctgggaattgaactcagaacctctggaagagcaagaagccagtgctcttaacctaaccattgggccatctctccagcccaggagatgttgtttactgtagtctgcctgaagttgggacaaaattaaaaggacaagatgggtgtgatgtttaggggagtgtgaaggctaccaattaagtctattttcctccatcaggagagctaactgtggtcaacaaagcacttggaagaaaccaacatgggtctattcaacagatcctgttaataaaacttttattctgctgttaaaattgttgtcttgaaggcttacggcctcagtctggtaaccatcggcctaggcctggaagcttctggcctcatacaatctaatctaggccgagaatgttttcagcctctgagacttaccactgaaataagctcgccattttcttggtcttactgagctctggctggccgggtcaactcagctgttctggctcaagctcttctcccaagtgacttgttcaaactggcttttctctcagcctctgaattgctctgcttggcctcaaactaactctagcaatctttgctaatctgggtccttctcattctgtctattcctgtgtttagcttattctctctgcaatctcactctgtaaaatgttcccagtaaaactgcccctgtctccctctctgtgctgctctactctccctctcaactctactgtacagctctccaggaactctgctgtaccctgcactgtactcccttcctcctgtgctgtccgtctctcccttaagttgcttctctttcctctctcttctcataagagaagatattgggcatatccaattctgtcaaatctttctttgattcatcactctgtctgcccctcaattagacatcactctcaaacatggatgcttccttctacaaactaactttaccttcattgtttgggatgaaaggtgagtactaaggacatgtctgtattccatccagagagattaaagatgcgtgctaagaaggtgagccacaccataacttgaaacaggtttcaaatatgctgtaacaaaatcctgttatgaagatgtttggccgatcaagatgacactgagtgacccttcagagctagatgaataatagtgaagaaactgatgagaaatatgtgaaatcctttgagggtgaataaggcacccatccaccctccaaataaaacagtgtgaagcagcctgacccagaatgcttatcttgaaatagtggatgatattgaggcctgcccccccccaacatagatgtagaagttttgttccatgcccaccagctatttcatactgttgctgtaatatgcctgcccgtcattgacacagaaaaatagcttgactcagatcagggtcatgctgaccacataccctgttatgttctttatattatgaggtttgtaaatcttaagaaatttcactaccataatcttcacataggacccatcaaattaaagggcaatatgagctattatgtctaaattggcttgagtcggggccgaccactaggcagcacttccagcacctgcgtaggagctcagtgtggtttttgctgttttagcctttagaagctggccttgagaagtgtccagcactcagctttcagctctcaagcctgaactgttgccttggtcgatcaggttttggttaatagaagacccattcgcaatactaatggaaaagaaaccattcctaacagtgctactgaagaaagccccccaacttcctaatgggtacagataaacacaatatacatatttttaaacagataaaactctggttggtattgagtataaagactgagctctggtgttcagaatccatgagattcctttgggtaagaagtggttatgaagctgggtgtggtgacacatcaccctttaatcccagcacttggcaagcaaatcaaggccagcctggtctatataggaagttccaggttagccatagtcctaccttaaaaaaaaaatagtagttatattccttcattgctagtgggagtgaaaacttgtacaacccacttcagaaatcaatttggtggtttctcagaaaattgggaataattctatccaagacccagctataccactcctgggcatatacccaaaagacaccccaccataccacaaggacatttgctcaactatgttcatagtagctttatttgtaatagccagaaactggaaacaacctagatgtccctcgatgaagaaaatgtggtacatctacatgatggaataccattcagctattaaaaacaaggacatcgtgaaatcttcaggcaaatggatggaactagaaaataccatcctagctgggcagtggtggcacatgcctttaatcccagcacttgggaggcagaagcaggccagcctggtctacagagtgagttccaggacagccaggactatacagagaaaccttgtctcaaaagagaaaaaaagaagaaaagaaagaaagaaaaaaagaaaagaaaatactatcctgagtgggtaacacagaacacagaaagacatgtattacaggaacctagtataactgcctcctgagaggcgtcatctagcagcagatggaaacagatgcagagacccacagccaagcatcaggcagagctccacgagtgttgtggaagagtgggggatagaattgagcaaactggagggggtcaaggataccacaagaaaacctacagagtcaactaacctgggcccataagggctcacagagactgggccaccaaccagagagtatacaggggctggacatatgtcccctacagcttagtttttgtgtggaacaattggaacaaagtttgtctctaactctgttacctatcattggattcccttacccctacctggactgcctggttgggcttcagtaggagaggatgtgctgagtcctgccaggactagatgttccagggtggagtggtccccaagtggagtggggttccctttccctgaggagaagggaaagaggtaatgggggagagatctataagagtgggactaggggaagaaagggagggaggctttaaatgggatgttaagtgaataaataaataaatgaaaaaatggttgtttttaagaactccatatttcagagatctcccgtgctcatggattggtagaattaacatcgtaaaaatagccatcccccttggtcctgtgaaggctcaatgccccagtgtagaggaatgccagggcagtaaggtgggagtgggtgggtaagtggatggctgtgggtggcgggggggaagcacccttatagaagctggggggatgggatgggggtttgcagaggggaaaccgggaaaggggatatttgaaatgtaaataaataaaatatccaatttaaaaatggccattctaccaaaaaccacgtacagattcaacgcaatccccatcaaaatcccaacacaattcttcaaagacatggaaagaccaattctcaaattcatctggaaaattaaaaaaaaaaaaaaaaaaagaatagcaaaaacgaatcaccatccctggcctcaagctatactacagagcaatagtgataaaaacctaatagtattggtacagagacatgcaggttgatcaatagaatagaattgaagacccagaaataaaaccacacacttacagacacttggtctttgacaaagaagccaaaaatgtacaatggaaaaaagagagcatcttcaataaatgatgctggtctagctggctgtctgcatgtagaaaaatgaaaacatatctatatatgtcacctggcacaaagctcaagtccaagtggataaaggaattcaacataaaaccagatacactgaatctaacagaagagaaactgggaaagaatcttgaactcattggcatggggagggggtatttcctaaacagaatccaatggcttaggttctaagatcaagaattgataaatagaacctcgtgaaactggaaagcttctgtaaggcaaaggacgtagtcaataggacaaatcgacaacctacagattggaaaaaaaatcttcactaaccccacatccgatagagggctagtatccaaaatatataaagaactcaagaagctaacccccaaaaaaaaaaaaaaaaaaaaaaaaaaaaaaaatcaaacaacccaatcaaaaaatggggtatagaactaagcagagaattcacaacagaggattcctgaatggctgagaagcacttaaagaaatgttcaaagtccttagtgatcagggaaatgcaaatcaaaacgaccctgagattccaccttataccaatcagaatggctaagatcaaaactcaagcaacagaacatgttgatgaggatgtggagaaagaggaatactcctctcttgttggtgggattgcaaactggtacaaccactctggaaatcaatctggaggttcctcaaaaaattgtaaataggtctacctaaagatccagctgtaccactcttgagcatatacccaaaagatgccacaccataccacagggtcacatgttccactatgttcatagtggccttatttgtgatagccagaagctggaaacaatccagatgtcccacaacaaaagaatggacacagaaaatgtgattcatttacacaatagaatactactcagctattaagaatgaggacatcctgagttttgcaggcaaatggatggaactaaaaaatatcatcctgagtgaggtaactcagacccaaaaggacatgaatggtatgtactcactaacaagtggatatttgccaaaaaagtacagcataccctggatacaatccacagaactcaagaatgttaagccgagggggctggtgagatggcttagtggtttaggagcgccgactgctcttccgaaggtctcgagttcaaatcccagcaaccacatggtggctcacaaccatccgtaacgaaatctgatgcccttttctggagtatctgaggacagctacagtgtacttacatataataaataaataaataaataaataaataaataaataaataaaaaaaaaaaaagaatgttaagccgaagggcccaagtgaggatgcttcaatcccacttgggagggagaagaaagcaattgggggtcgggggacagaggaaaggagggacctgggtaggaaaggggacaaggagggggaaaggggaacatgatcaggtattgaagtggggaacaggactgaagccctgagggccagcagaaagagtggaaacaggcaacctttggaggtaggaggttgggggaccctccagaatgtaccagagacttggaaggtgaaagactcagaactcaaagggaggggccttagatgaaattctctacagtggggagaaggaacttgtagagtccacctccagtagaaagacagggcatcaagtggaggtatggggttgccatcccacagtcaaaaactctgacccataattgctcttatcaggacaaaaatggagaagagcctaagggaaaggagatccagtgacaggcccaaattgggatcccgttcaaggggaggccccaagacctgacactattgctgatggatgatatggtgtgcttacaaacaggagcctagcatgactgccctccaaaaggcccaacaagcagctgatggagtgagatgcagatacttacactcaaataatgaacagaagctggggacccctgtggttgaattagggaaaagctggaagaagctgaggagtagggcaaccccgtaggaagaccagcaatctcaactaacctggacccctgagatctctcagaccctgagccaggcaacatacacccctgatatgaggcccccagaaacatatacagcagagcagtgacagatctgtccttagtgagacaagatgcacctaaccctagagacttgagacctcagggagtggggaggtctggtgaggtaggggtggaaagagtggggacatcttcttggagacagaggtggggggaggtataagatgaggaatggtcagagggcaaactgggagggggaaaaagactggactgtaaaaaaggattaaagaataaaacattttaaaagagaactccatatttcaggatagcaatggaagtctcactgttttggttcctggtctactgctgtgaagagataccatgacccaggcaactccggtaaaagtatttaatcagagtcttgtgtacagtttcagagggttattctgttatcatggtggagagcataatactggagttgtagctgagaggtttatatactgatttaggcaggcagcagagagaggcagtaagaccgggcagaaacctcaaagctcatctctagttaaaccttttctccaataagaccgaacctatgtcaacaaggtcccttcccatactcattggcaacaatccctcaagtggatttttgtttgtttgtttgttttgttgtttgttgtttgtttttcaagacagggtttctctgtatagctctggctgtcctggaactcactttgtagaccaggctggcctcaaactcagaaatccacctgcctctgcctcccaagtgctgggattaaaggtgtgtgccacgcccagctcaagtggatttttttgctgaactatttctccagccccaatacaagaaatattgtacatgatggattcaaaaaaatatttaaaaatgaagtcagactgggttcttataaactccactgatctcatacatgatcatgtgggagtaatgggatttgtcatgcacaactcagcggagtggaattttaggaatgctaaactgtcctttttccagaaacatcttgcacaaatattctccttgtccaagttttttcttaacatgatcagcgtggggctggaatgtagctcagtggaagaatccttgctttctgtacatgaagccttaggttcctttctcaggtgttgtaaagaccttggtgttcagagaatgtgatgtcgggctcatctttgttataaacttcactgaatcgggaatcaactcacccactgggcactcctgtgaatttcttttttaaaaagatcaatttatttgaagcctgaaagtaggcagcatccttctggtggtagcccagatataagaacaagagtgtgaactttcctttttacctgttggtcctctttgaggttctttgagctaatttcgttgagcttccaatgcaggtctccaggattgttctaggctttcaatgccagatttggactgctgagtcattgaactttctcactgagcaactactggactcttggcttcttcaatgtgagttttgaacccaggacatttagagtccaagatttcactctgaattaatgtacaatattgcccagcacgtagtattagttttctagtataacaaaaatggtaaagatagagtaaaacttagttctgaagataaaggagttgtctaactagtctattatttgggggcaggaaatggtttcccctgtcctcttattacacacttatgtggtagagacaaagggagatggaaaataaaaaaaaaaagcctcatcattttcttagtttttgttttatttttgtttgtttggagacagggtctcactatgtagctgtggctgttctagaactctctatgtggaccaggctggcctccaattcacagagatccatctgcctccgcctcctgagtgctgggattaaacgtgtgcaccactatgcacagctgtggggggagggatgcatatttaactatttattttggatattcttttcattaactctttgtggggctgcagaaagagctaagcagtgaagcatgcttggtgctcttgcagaggacctcagtttagttcccagcactcacaggtcagctcacaaacatctgtaaccccagatccaagggctccaacgctgtcctctagtctctgaggggtacataggtggtgagtaggcatatatgaatgcactcatactcacacacacatttttttttcaatttgtgtgtactttgtatttttggtgtacatattcacacatatgtgaaaaacgtccaaatatcaaattttgtttttaaaagctgactgttgacagcctggtcaacaataaagaaattgtcatggtagcatccttttttattctgagatactgtaaagttgagcagttagaaattcaatcccgttttctagaacaaccatatttttctaagctttctttgtggcagactttggtcaaccacagaagtagaatcactctgaaagcacattcctcaaatggcattactatgatgaagctaaaaaccactaatcaagaagcagccagtttttacccaactatcccaaaatggcagcaagattttttttttccttttggaagcaaaaatctttaaattctatttcgtagcatttatttattgtgtatatatgtgtttggaggtcaaaggacaagtggaaatgattgtctccttacaccatcagggattgaattgttgagccatcttggaggtcagctaaaattctaacagagcaagaaagtccggcaggctggaaatgcacaatccagatgaggcctcctccctggaagacttgcaggacatcctctttggcacaatctccttaggaccttcgcagagcagatgggaaccctgtataatccccacgcccttcagacagaaccaggtggcctaacgccaagttgagtcagaggctcaagccaagggtactcttgcctgttctttgaccattacaccctaccaagtgttcccggcgattagactctgtgatcctccaccctcggaacacccataagcctctctgcctgcttggggctaggaaaagcgcctacagccaaacttggagaaagcaggcttggggccaagccgaagaaggggcgggactatgtggaggaaggaggagctatgacaattaaggagcggggccaagacccaaaacggcccaatgctggagggtcttcgccgcgctccacctcccagcctctgccccttgacttcgctccgccccgttccgggtccctccccccaacccccggcccgcccagtctacgcaacaccccaagcgcaccgtcctacccacgcgaggtttaaccacgccctctcagaaaacttcgccccgccctagtccggctttggcgggccttagccacgccccctcgcgagcctaggctggcgctcttcggggcgtggtcaacgccgccatttgcgggccactaccagctagtggccgcggggccgcctcgtcccgcccccttcctgcctgggaccggccctcaaatcgactgctcgccgccgcagcgagggaagagggtgcggccgccgcggcggggactgaggcacagactgacccggcgtggaccgcggagatgctgggcgtggcggccggaatgaccaacaggtacgggcgcgcgcgcgctctgcgacccgccgctgcccgagcctcctctgggcccggcccggcgggcgggcaaccttcgcctccgcgcggcctgcggctggcgagaggcccggacacacaccgcccaagcccgaggcgggagaggccttcatggtcctgctgagctgtcctgtgcggcctaggggtgtaagggcagatgctgtcccagagtttggctaatagtactttacattctaccgacaagaagaatggatcagagggtctcagggtcacgcagtccaatacatttgttatattagaaatgaaaacggacgtgtaaaatgtttattcgttgaatgatacgtgatctattaacatgcataacaattgaatgaaaatagcataccctaaacagaaaagttaagacgaacagcctgatacatgtttgttttacagatcctttccacgtctggcttaatagaaaaagcagctgggttccccttttgcattgtcttttgtgatgtgttttgaatgaactatttaaaagaaattcgattttaagtagatgaagagaaatattcgaatggcttttccaaatacttgtgggtattctttatgattctgccagaagttcagaagatgtttcttcaaagactagttttaatatgaaacccgagctcacagttatatgaaaattcctcagactgtcttgtatttgaatggaactgttactcataatggatttttattggcttaccctattaaggaagattctggatgctaacacagggtattaatgtctctaagtgagcttcgttaacatcaccaccggtttcattcagttcttaactattcaggaagctgtcagactcgacaggcttcacactccagcattgcaattttcagtggaaatcgcgaagcttttctcattatcaacaaaatattgtcagttgtccccaaaatttagtttcaaggaaatgtttgctaagtcactgttggtttttttttttttttttttttgatgttccttcagaacaaatagtatttcaagaaaaaatgcttctaactcagcccagtgtttaacataataatgtgctcaagctctattgctttgggatgtagcaggggcactgtccgcacacttaccattgggttccaggcacctaggaagaggatcaagagctaagaatttgtacaaccactgtactcatcagaagcaattattgtattggccatggacattgtccacctggataaaggatgtgtggaatattgattgcaggggttacagatgtgaccaccatgtgcgccccgcccccatttttatgcattaagtacatccatattggtacactactgttgccctcagacatctacaaaactgaagctgttgtacacagtgaacagttctccattccttgttcccccagctcctggcaactgccatttttcttgcttgttttaacttttcagtatcccggataagtggagttacacagtcttcctttcctgtgccatagtttgctgagtgataacatggatgtacagcagtttgttgtactcttcacctgaaagacatttgggtgtttgccttttttttttttttttttttttttaagaaattaaaaataaagttagtgtgggtgttcatgtacaggttttagtgtgaacatgatcatgtttttcctttctgtaaaataaatgtctaaatgtataaacttgccagactgtgcagtaattttacgtttaccttttaaagaaatggatggaatgttttctcagagtgactgtattatttatttcatcagacacttaaaggagaaattgacattcttatcctgtatgtaaagaattcggtaaagctatcgtggccttcccagtatttcttttttttttttctttttaacgatatgtatgtttgtgggcatgagcatgtaagtgcaggtacctacagaggccagaggatgcccctaagtctggagttacagggggtttgtgaggtgactgaattgggagctaggaatggaacgagggtcttctgtaatattcatgttttcacccaccgagccatctctctcttcagccccaaaatagttcttgaatgagagctgtagtatggacttttcattcatagggagtttgtttggttgagttttttgagacaggattttgacttgattattaggacttaatgacaaagagcaaccctgggtcctaaagttcctgtaaggcagtgccatcatgaacagggaaactctgatggcactttctaaatgtgccatgtcctatgtctgcttctgaagtagggaaatcgccttgtgggatgttttgctttgtttgtgtttttgttttaagtctgggtctcatagtctaggccagccttgaacttactattgtagccatagtaaccaagaacgtaaagcaaccgaggatctaaagtaagtaagccaagggtgattttttaatttctcatcctcctcttgaatgctagaataaaggcatgtctcacccgtttttcatgggtttctgcagagctgggggtcaagtccatggctttatgtatgtaagggaagtactctatcccctgaggtaatatccccagccctgaaataccttagttctttagctgttctgtgctctacagtgtgctctacagtcttggagaaaaaaagtccatcaggattgtgcccttacttgcttgtttgtttattatgagattgcactatattgattttagcatttgcattctctctctttgtgtgagccaagtggctcttctccttggtagttctttatgatgctaagtgcgggttctggaaatgagctttctctccttccctgggagggctcagcctctccttcgggtggagaaactcagcaaccttagaaagccataatgggagagcagagcctaattctccaagtatattttcagtaacacatttgttcttgagacgatcctttaagtatgcctcagttcagaccatatcattgagtagggttgcattaaaatagcaggaaaaacgtgtcaaaccacttgttgattttacagttcttacaaccgctctaagctatggtttcttaattcaggaagaccatttacattgcctacagaaccttaatgtattccagaggactcagagcttaatgccttaagctatttaaagcaagaattatacaacctgttttctaatgctaaaccttctccagtggtgggtggttgtggtagttgttgttcttaattttgtgcatagttgttttgcttgcatgtatgtgtatggacgctgtgagtgcagttccctcagagagctctgggttcccaggaactggagcttcagaagttgtgagctagtgctcctgatggatgaaccatctttccagcctccagcagtaggagttttatgtcccctcatcgtgatgttatttatttcatttgacagcatcaggtatttccacagtgaagcttagtgtgtgtgtgtgggcacatacatgagaggactatatatatttttcctgcttcttttttcatgttgaagtacattttggagctttaatgagtctaccaactctttaaaaaaaaatgtatacgggtgttttgcctgcatataggtctgtgtatcacgtgcttgcagtgcagaaggtgtggcaatgcagttggttgtaaaccaccttgtgctaggactcaaacctgagtcctctggaagagcagccagtgctcttgacccctggggtatctctccagcctcaagcagacttttaatatggggacaggaagttgtagatagagtaagctttgagcaatgaactctaaataatgttggcattggtaattagtgctggccagttagtaaaatggaagaggctaggaaactgtgattgctgtcacaatgtggtggacagaaggagagccaggatcctaggacacctaggagtctagggcctttctaggatatacaaagatgagtaagataaaatgacctacagaacaaaaacattagccacatctcaaaagggtttaggaaatctaggatgagagcaggttttctgtttttttgttttgtttggtttggtttggtattgctttttttttttaactgatttttttgagttaattaaattttaagtttttattatttatttatttatctatttatctatttatttatttatttatttatttatttatttggtttttcgagacagagtttctctgtgtagccctggctgtcctggaactcactttgtagaccaggctgtccttgaacccaaaaatccgcctgcctctgcctcccgagtgctgggattaaaggtgtgcaccaccactgcccggcaagtttttatttttattttatgtgtatggtgtgtgtgtatgtaagtgtaccattgccgtgtattgccctcagaagccagaagagaacgttagattcccttggaactgcagttacatgtagttatgaacctccatgtgggtgctggaaattgaacacagatcctctggaagagcagccagtgctcttaaccactgaactacctctccaacccctgggttttttgtttgtttgtttgtttgtttacttgcttgcttgtttttgtattttaatgcaaattggtccacttgcacctgatgagatctaaaatacaggagctgttgtctttgttgctgagtttgaatgtttatcattcatgttgtttgtagatattcttaaaatactgttggggtcctattacttcattgtgtttgaaatattagaaaatgtctctctttttttctcttcttttcttctttctttctctctttctttctctttcttccttccttcctttctttctttctttctttctttctttctttctttctttctttttggtttttttgagacagagtttctctgtgtagccctggctgtcctggaactcactctgtagaccaggctgtccttaaacccagaaatccgcctgcctctgcctcccaagtcctgggattaaaggcgtgcgccaccactatccggcatttttttttttttttttttttttttttttgagacaagagtcttatgcagcccaggctgaggtctccacataacaaaggggtttgagggaaaccaagtccttcagaaactttccaaaagcttttttcagtgcagctttactagatctgggcttgcctgtgttggatccataggctgtactagtgtaacagagtccagttcagccacagtcatctgggcgctcgctcggcatgctttctcaccagtaacatggaggacttcgtgtgggcactggaggggaaagtccactcaccacactagcagatgttttcagcactgtgagctgtacagtctatagttaactacttgtttgttgtagcctaacagcaaaacaggaattaagaaatgagattgggtgcagtccaataaaattttaaagtctcagggaaccatggaactgtttaaagaaagaggtctaacatttctgttactgtaaccccagatcagggaagaaaaagcctattagtgggctaaagacactaattaagacacagattttgattatgtagattttaagaaatgacccaaatatatactttgtacgagaaattcatcttgtatatataacagtataggcaaattgaaagtaaaaagatggggaaaaatacattatgataatagcaattaaaataacttgtgggatactttattaataccaatcattgaagtgtcaggtaaaatagacctcaggacaaagtaaacaacagacactgcagtcaacacaagtagaagataccttctcgttctcaacatggaatatgtatgtatgtatgtgtgtgtgtgnnnnnnnnnnnnnnnnnnnnnnnnnnnnnnnnnnnnnnnnnnnnnnnnnnnnnnnnnnnnnnnnnnnnnnnnnnnnnnnnnnnnnnnnnnnnnnnnnnnnnnnnnnntacatacaatacatacatacatactctggccttcatcatggtaatggcctcccaggaacaaatccagcattcacatccagacttctgaaggaatgaccaaagatgtgaccaacatttataaaccaaccccttcaagattgctgagtatcagtgatgtgaccttgcaaaagactgtcccaaggtaacaatagcttttcagcctgacccctgaagaaccaccctgatgtgtgaccagcatttgtgactcagcccaggaaagattgataggactagttagtatctatgaccagatctcacaaaagattgcctagggatgtgttagtatttgagcccataaaggaaagccaagagagtggatgctggaaccagcttgcaggtgagactacacttagactttataactgtatccatgcagctctctcccactcacatatattccttctttgcttaataacctatattaatttgacaggccacctatatcccagacttttattctgtttttaattcttcctttgtatcttttttgtatcttttttttttttttacaagctaaagcagagaccatggagtaacactgcttactgacttgttcctcttgtcttgctcagctagctttcttatatattctaggacagcctgcccagagattgcattacccccactaggccaggcccttctataccaatcacaggcatgcctgcaggtcatctgatggtagcattttctcaactctcttcagatgactaccttgtgtcaagttgacaaaaacaatcgacacagtatgtgcggacatgtggtgctggtgtggaagggagaggctgatttgtaggagtcagctctctccttcactttatgcatcccggggaatcaaactcagttcaccaggcttggatgcaagctcctgtaagcactgacccatcttgccaccaaggccaccatcactgcccctcttcctcttctccccttccttttatgcttttttgctttccttttgataggttttccaaagagcatagtctgagtgggtttatggagtctccatagttcagcctcctgatacatgagacttttatctgctagcatattttttaactttctctccttattttattttatgataaagtctcatgtatcccacattggcctcagatttgctgtgtggctgaggaggaccttgaactcctgcctctacctcccaaggtctctcaggtcataggagtgcactgtcatacttgacttgtacagtactagggattgaaaccagggccctgaatgctatgtgagcactgtgccaactagggtgtgtctccagctaccacactctttccattctatctttgccttccttatgccctcctgtccctcctgttccccactcctctttactctttgctctactttgtttctaccaactcactgctaatcatgggccttactttctttcctttttcctccactcgaatttgtagtagtagattgttgcatactatactattgtttctttacttcctaaaaggagtgtgtttactgggtgattttttttttttttgattgttactttattttcatagtgggactatcctttaacaatgattgagttcaataacaattttctgttcttggggaatgttgagaattgagcttggttgccccaacactgttgtaagagagaaacattatatctgaactttactatatagcttagtccttcttaaatattataaacacttttgttgggaggggaagattatttaaggaaaaaaattcagcagcctaaccccatatatacaaatctcacataaaagcaaaacaaaaaccatgagaagcctaaaatccaaggcagcatgactcctccaagatctgctaatcttttgcaattccctgcaatgacagtaaattagatgaaatcccattcaaagacttagaaagtgtgataagtatgtttaaagagaaagaagatattaataaccccctgaatgaattgcaaaaataaaagacagctttataaatgtggggcaggggcaatacagaaaatgagattggacctcagtaaagggatataagtactgaaaacaaaaagtaaaaaaagcaaaacaaaaatactggaagtcgtatttactaagttgaataaaaactttgtggatgcctcaagaatagaatggatcagagggatgacagaatatattggcttggagataaggtggaattggaatattcagttgtggccatagaaggagaatttcctgctaaagatttagggaaacattttacttacaggaatatgggtaaagagttacttacaggagcagaaatgactcataaccaccaccctaccatggttagaaacatgagcacagagctagaaacctagagcacattgcacagcctgcaggcagctccacagggtggagagtgtcccttccaaatgattcagggagcctaaagctcttctaggcagcttgtctctgctttctttaggcagttggtttgctgtcagagtctttagggaaacattttcagtaagatcatagcaggcagttccacaaatctatgaaaataaatgtgcatataggtacaagatacattgattgctagcaccaaacagacagatgcaaaaaagaacctcctcccaatgttatgttatagttaaaacactacatatccagaacaataaagttcgttagaagctagaagagagaaatataacagaaactataggaggacttgaaatgatatatttcaagacagcagctgccaattcaatctactatattgcataaactatttgtcagtatggaaggagaaaaaaattcacaataaaagcattctaaaggaattaaactctatagaagatacttgtagaattcttcagactaaagagaaggacaaacactgaaaagaattaacagtaattaagccaacaggacagcaagtagtattaagtcgacagaatagcaggaattaatgcacgtctttcaatagtaaccgaatattgatagtctcagttacctaatcaaaaaacacgtaataccatatttcttttaaagcattatctgtctatttccatttgtcagaaaagtccatcttccaaaatgatacaggccagtaccattgccccttctagaatttaaaggtaagcccctattgctggacagacaccatgcactcgggacataagcctcaaaggatttgaactgaatctgacttggaagcctccttcatgaggactagctttcataggaatggggagtgctatacaagctgccaaaggagagaagcaaccatctacaccataagacatatcttaaaattttatatcccaatacgttagaaaactcaaaagtggatgaattttacagatgcatatcacctagcaaaattaaaacaaaatgagacaaagtaattcaaacagctccaaaacaaggaacaaaatcgaatctgtaataataataataaaatgttccaactacaaaattccaggtctagatggatttattactgaattctacaagacctataaacagcaaacacttttcaaattagccaataaaacaaacaaggaagaaatgttaccagattctttttacaaagccagtattattctgttaccaaaaccagataaagacacagcaaaaaaacaaaattaggcattattctctgatgaatataagtatctgaaaatgtaattcaagaacattaaaaaggtcattagccaaggtgggtgtagtgatgcacacctttagtcccatcacttgggaggcagaggcaggcagatctctgtgagttcaaagccagcctggtctacagagtgagttccagaacagccagggctacacagagaaaccctgtctgggggtgggagttgttgtataaatgagaagaccagagtttgcatgacataaaaaggtggactggctccacttgtagccctagtgctatgaggtggggtggagatggggatcagtggggcttgtaaaattgtggctgtatgacttatatctgtgtcatgagtcatgtgatttagtctttgaagttgtactggtataccagagtttgtaccagccgttgcgaaacgagtaagcagaatccttacactccttaacccatacagtctgggaagctaactgactaacattctaaaagacatgctttcctccagccatctccagttagcctacttgatagagaatcgacaccgccacacagtgaggtctgaggttatcttgcccctctggtcgggtggtcagtcctgtgtctggtatgcatggtgttggtgcttctcttcttctgcctcctgcatttttcacatgtctgtagagggctggattgcttatagtattttgcagacagattcctttctacaagatgaagtacaaatgtacttttatagtgtagaatataagagccttatttgtcttctgttctctatcatgactgaaatttagggctggatagatggctcagaggtttaagaacacttactcttccagaggacctgaattcagattctcacactcataccgcagctcccagtcatctgtaactccagccccagcacatttgacaccatcttctggcctccgtgagcatctgcataacatgtacctaagtagacaggaacatacacataaatacaaatagatcaattctgaattcattctaaaatagaaaaaatgatgatgttcattagggattgttgtataaagttagatttaatgtagatcatggtaaatgtagatcacggtagcattttttttgtttttgtgttttgagatagtctcattctgtagctcatgctggcatggaactcactatgtgaccccagctggcctagaactctaaatgatcctcctgtctcagactccccagtgctgatattacagatgagataggcacaaatggaggcagagataccaggcttcatccttatttttatctgatgagcttaggtaagaagtcaatttcttttagcaaaagcaacttctaagtgtctattatatctccagcacagacgaacttgctggctggctccaaggcactgggtacttccctgggtagctactctttctaaaaaacagaaacagagtttcataaaagtgatatgtgttaagcctgtaattaactaataggggacctttgggaatttgatttatgccttccctctagctcagtttcttctttgtgtgtttcagagcctgtaaagctaaccttccttaaccttgggcttgagttgaataccagttatcctcgtgcagagttttagaaaacaaaaatcaaatattcattcatttcttcagttttctcattcagagactttttaaggacatgatgcctagaccatcagagttgcaggccattacctgtaatggaatattggaggattttttgggagggttggtagtgcttagaaggctatcagcatagttcttgttttggaatgcaatatagactggtccagtgaagggtatggtctttcttggattctgagatggactcattcgtatgagcagtcttgtttgaggagtgtagatagtggttcattggtgaagtcacaacggtggggcaggataaaaagctagggaagattttgaggatgtgggaaaagaaaagatctctgactggagccttttagcaactgagaattaagaattctagtgtaataaagtcaagacaggatcttatgcttttaattccagtactctgaaggcagaagccgtctacttgatctacaatagtgagttccaggctgccagagctacatagtagactaactttcagagaaaaaacgttagtacaattaaaaatatttgctgtgaagattaccaacatcgggataataccactttaaaaagatctttttgttatttattttatgtatatgggtgttttgcctgcatgtatatctgtactatgtgcatacctggcatccaaggaggccataagaagaatcctctgggactaaagttagaaaacgttgtggatactaggaattgaacatgggtcctctgaaagagcagccaatggtctctccagcccaagataatattccctttaaatagaggtatttcatgctaaaatagcaatgaaacctggttaaggcctaagattttatgtttctcaagtatagccttactctctatacacgcagagaatatagaaaaacaacaacaacaacaacaagtgttaacttcccctgtaacctttgcaacctaggttttaccctattagctataatctatgcaccttgggaaccaccttctgattcacttaggctccttagcagggatttaaggtgtaaggtcagaatccacctaaagcagtgtgcatggctgctgtcaagacacttgagatgcccacaccactctctcggcttccttccttccttccttccttccttccttccttccttccttccttcctaagttgctttagacatggtgttttatcacagcaaaagtaactaagacatgctctctattagtcacttaactgaaatcctgggagattgaggtttgggctgtaaggcttctgttgtactttttaaagcttagtactgtacacgtaggtacacaagtgcttctgttgtctctagcactccattgtctgctgtcccttgtcctgactgtaaacaacagaagacaatttttcataacataaactaagaaaggaacttagtaaaaagctgtaggttaggacaaaagaaagactagggctcttagttgtctcacttgagtcagcgccagctgtgcttcatgcttcttatttgtcttaagattcccatattgggagcagaaaagtctgtctaaccttatttggacatgtatgtgctcagcctttgtctctgaagtcagggctttccccctcctatttattaaactttcttccatttgtttatttgttttccagtgttagagattgaacctgggggcactgtgcttggcagggaagtaattcaccactaggaaatatcctcaactctcagggtttccatatttgctcttacctaaggagaaatagggaaatggattacagaacgtagtgactgtccactacaaggattttacctaatttgggactgatccttaaacaagcaagctagggtcttagagtgtcatttagtggtaagatgtgtgtttagcttacacaaggccttaggttcaatcccaatcccgagcatatcacacacagacacagacacacacacacacacacacacacacacacacacacacaaacctcattagttgaagaagctactactcacgagggtgtaccccatctatcatgcaggatttttcaagcgttactgttattgtgtatgtgcatgatgtgtttctggatgtgtgtagcatggttcatgtgcacaggtcagggacagctttgcagagctgcttctctctatttttccccccacttttagttagattccagggatcaaactcaggttgccagctttgtgcagcaaatgcctttacccactaagcccgctcactggaccttaagcaggtttttaagcgtgttagaaaaaaagaaaaaacaaaaacaaaaaaacaaagaagataggcaatgtggtgcttttccgtaatcctatcagtgaagaaactgaaacaggagaattatgagttgaaggccaacctgggctctctaaagagttcaaaggtgggggctggtgagatggctcagtgagtaagagcactcgactgctcttccaaaggtcctgagttcaaatcccaccaatcacatggtggctcacaaccatctgtaatgagatctgactccctcttctggagtgtctgaagacatcttttaaaaaaaaagagtttaaaggcatcttggattacataaagaggccatgtcttgtgaatgggacgcagacagacacagtggtgggaagatgaaagaagagaatttttcagccaaattgagctatagtaggattttctgggggttgtccatgtgagactgaaaaaatattgtctgaaagaaacagaatagtaaagctattcaagtttatatggtaaagattagaagagacatcagtggctaggtaaggtggcatataactgcagttcaggcacttgggggactctaaactggaggctagttaggccatatagtgagttccctgctgaaagaagggagagaaaggaacagactgacagactcagggcaggtcctcatactgcaggatgctacaagccacctaactatggggaggtatcacattaatgcagtgctgatcaaatttactccattgtaacttaactgtaaataacaaaaaggtatagagataggttgaggtaggacgaggatttttcatatgagacccctgtgtcatggtcatatctaataaactaacgtagatcttgacaggtatcagcatcagaaatcactgctgggaattgtaagctgttaaggagagacccataaagaattagaatttatgtgtgagagcccatcctcctgtgagaacatgctgtaccttctggagaccgtctcgtcctagagcaatttgtaaggatcattttcttgtcagccccattcaaggcaggcacatccttttggatcacagagttattctcttctaggactattctgctgtttgagtatttttaacatttggttctcttctcccaccccatccccaacccccacttggtttttttgagactgggtttccctgtgtggccctggctgtcctggaactcactctatagactagactggcctcaaactcaatctgcgtgcctccgcctccctaaatgctgggattaaaggtgggtactaccataccccactctcagcttggtgttcttaaagaattgttgctgtttggttgctgcaaatggcttttgccactgctgtgtagttacagagccagctaagaactggctcacacttggcaggatctaaagaagtcatgataatggagcctttgtaaaagcactatctgggctaaaatctctgaggcaaggctcaggatcatggaatcttaagtggaggttttagaaagtggccctgttgtcttctgttagaaatgatggtggcagggattgaaggaacaatttggggctattcttgtagtttaggaagaattgtttattgtgtaaactatcctggtacatttcataaactgctaaggaatatgagatttcaagtgcagagtggcttctgtagatctaagccagctttcccagagtctctggggacctgctcttgtgtccacaccacagctactgctgtggattctgatacacgtcatcacatgaggaggagctgtggggcctgagtctcaattgaatgtgtacaatttgttagaattacagcaatctctggactataggcaaacctaagatcactcagcctccagttagagaatcttgaacactggcaaatatttggatatctttcattagatttttctcctgtgccatgttatttaatctccacagcttttgtagaaaaagcaagctatttttctcttcctttttttttcgaagaaccatttgaaaccagaagacccttatctccttacaaattagccagtggctggtaaggtgaaaaggagacctggatcctaacacttcaaatctcatgtgtttctgtggcattaaactgcctctgagaaaactgtttagtaatgaggagcaaagtatttaagctggttattctggtggggcatagtggttcacatctttaatcccagcacttgtgaggcagaggcagactctctgagttagaggccagcctggcttagagttccaggatagccagagctacatattgagaccctgttttgaaaataaaataaaaaccttgttattctgaaatgaagcaaactgccagatgttttaccaagttctaccaattaagctactggggtgcaaaaggttggagagggtagggggctggtggcactcttgcttagtacctttcaagggtagcctttctctgtgtgtctgcgctatttgtagagactttcctgccactagagataaagcacagtgttttgcctctgttgttatctgttcttcaggtattctgtaccctcttttgtaagtcagagtcgcattagcctatggcttgctgactggacagtgaaccccaggactctgcctcctgcaagtatgtgccaccatattggttcttttttatgtgggtttggggtgtcagacttaggttctcatgtttatacaatcaacactttactgactgaaccattttcccatgtcttcattatttttcttttgctgtgaagagataccataataaaggaaacttctttaaaaagcatttaattgggggcttgtttacagtttcagagggtgagtccattaagaagaatggcagtaggcaggcaggcaggctgctggagcattagctaagagcttatatctgatccacaagccgtaggcagagagagagagactaggcctgacatggacttttgaaacctccaagcctacccccaatactataccttctctaacaaggccacacctactagtccttcctaaacagttcaccacctaggagccaaagagtctaccatatgagcctatgagggccattcaccttcaaaccaccacatgagaactacagaagtttgttttgatttgttgcttagtctgaatttattttaattgtccaaaataggcaattacttatattccataaagaattttaaaaataatctttttgaattgtctcataatcagttttaataacttccccaaattattgcttttattttatattacagcattagttttgaattatgttaggaattttcataaatatgaaacgagcttaataaggattaactttttaaaatgaggcagtggttacacacgcctttaatcctagcactggagaggcagaggcaggcagatctctgtgagtttaaggacagtattgtctatagagtgagttccaaggcagccagagctacaccgaaaaaccctgtctcagggaaaaacacacacacacacacacacacacacacacacacacacacacacacacaattaacttttatttaacattctttacgttcaaaaatttgtttcttcatgttttaaaacatgcctttaccttctatcttcagctgacacttgtataagattaggtagacatatcccttgattgttatggaatatggggtctttttaattgaaaatcatttttttgtacactatattctgatcacagtttacgctcccacaactgttcccagaccttccccacctcttcacttgcccaactccacacctttccctctctttagaggataaatgaaaataaataaaggaaaaaccacaagaaacacatataaaaatatataaacaaaacctaacccccccacaaaatcagaaacgacaaccttcaactaaaagatcagtaaaccaatttttcacttattaaatgtacttcaaagtcttttcatcagtgcatataagttacaatgtaaaaaaaggcacaaagtttaagtacacaggttggtgattatttttatgaattgtgaacacatagagcaatgactttgcatattattgatgttaaaatacagccagtgtcatatgcttagagcctcttgcttccaagtttgttttattatttctatgtatgtgtatatatggtgtagggagtgtcgagtatatgtagggaatactttatcccttgagacaaggcctttcttggggcctgtggtttgctcatttgtctagactgactaaccagcaagtcctggggatccacctgtacctccccactgctgggattataagcgtaggctgtcatgctgacctttttctgtggatgtcagggatcagactcaggtccactgcttgtacagctgggtgttcctaagtcatctccccagctccctatttacttagaagtctgagacagcctggcctggaacctgctagttataccaggctggctttgaacttgatccttgctgcttctaaatgctggaattatgtgtatggtggtacataccactatatttacttttaaaactttgttaaactactgtgaatactaatttgagtgatgtgagtttctaattttgtttgttcctttgagatgtattcgtggagaaccagtctctgctaggcatgagtaaagatattgatattacgtgtaacatttactacttatagtaacttgtacttggggctaggttactgaggaataaggcagatccctctgggaaactacacaggaaataacatctagactgagccctcagtgtgagtagaaattatccaaacaggccatttagggaggaagagctgaaggcaggaggccaagaggaacaagaaagcaggatgtggagatcagcacagctgctttggtgctgccctggagcctgagaatctgggagggggagccgtgggggtgctgaagcagggcagaggacagtgttactgctacttaagtttccttgtgacagataacaggactctattgcaaacaacactaaggaagaattttgtggaaaatagtgggatggttcccagaattgaagaaagagctgaattccaaaactttgaagaaagcaaacaaccaaggcaactcctggtctttctgaagttcttgtggaatttttctacagggccttagttaatttggtctggctgcagagtcttgtttgccacttagatatccagggtttgagaaatagtctgagtaagttaaattagattcactgaccaaaatgagcagtcatgtaaccagaagacggcatcagactctgtatctgtgttgactaagttgctgtttgttgtgtgatcaagacagcaagatttgttacctgacacatttgaggcccagcctagaagtcagtgtgtggaggcttagaaagccataagtaggtggggtgatggagcttcagaagccaggaagcctgtttcattaatccaaacaagagatgatatgccaacagtaatgccttctgtagggagggaagaaagcacatcgattctgagactcttaaaaggaataatagacttcactttggaggttagttagaaacattaaggcactgaacagagtcccatgtttctggcttgggctagaactattaagtaaacagtgctgtcttccacaaagagctcctttttaatttttttttccttttggtttttcgagacagggtttctctgtgtagccctggctgtcctggaactcactttgtagaccaggctggcctcgaactcagaaatccgcctgcctctgcctcccaagtgctgggattaaaggtgtgcgccaccatgtccggcttaagagctactttttaaaagagtactttcgttcagtttcaaagtattgagttagaatacatttaagttaagaacatttgggttagagttgttctgctatgaagtattgctggaagtcagagagccctcagagccattaccaatgggctcttgtcaggtcccaaagaaattcaggataaaaggctaactaaagtgcctattagcataacgaagtgtgcactggcctccgagctcactttgtacctgtggctcctctctgctcttccgcactccctccccctaccctaaacctctctagctcaggggctttattcctccagtttcagattctttaaaaacctgccatttcagccgtgtgctttcttgggtctcttttggtcccatctcttcttcctctcgtgctcttccccgatctctcccctctcatggcccagtctattctgctggtcatgttcaatctgccactttctgtctttgctctggattcttcaagtcaatctaggatttagctctggaagtacaagagggagggggtacttagggccagggcaagcagcagagatccaccacacagcagaactcatgcaagagatttattggggtggaaagtaaaagaccatctggtggaggggttgagggtggatgcagatagacagagagaaagagacagtgagagaacatgagagagaaaaactcaagaagagtcagagcaagtctctgcccttaaaggaactccatgggaaaacaaagaacttctaagtgtggaaattttccacccatgattgcaggaaagcccctgaaacttcagtgctccttcagaaagagaattcttctccgtaaggcaacggcctcctcacctgtttcctgagcttatctcctccatcagttatgtcttctgctttagaacaaaacaaattaggaagtaggaccttcaacacagactggggatgtccttgattaaaaagctaaattgtagtttgaatgttttggctatgactagtaatgagaagctgttatcttgttaaatgagttaattcggatcctaactaaggggttcctttagatattttggtcagtgcttttgccattaggtagcttaatagtcttaaaagtcctctggtctcagtagtggtattagacatatgttcgggtcacaaagaaagagaccaccactccaactgaagtgtcatacactttacaaggcaaactttactcttgatcaagagagtgtgttgggaacaccaagatagtaagcaaaggtttcattgggtgggaaggatttaaatagtttcctaaaattcttacaaagtaggagagataaaaatattttagttctttgtcttaaacacaagttttatagtatttgataaaaaaaaaattcacatttgctatttattacagtggtaccagaactgtttctttaaggagaaggcagaaacttttgggagcagtatttggacaccataaccattaagtaggctaaggccagaggcactgaatgtcatgcctagggcttttggaatggttaaaaataaaaagacaggaaagaaaagggaaggggaataaaaggaagccatataattacctgagcaaattatctgagcgtagaccctaacagtaatcataaagtactcttttacagtgtcaggaaaacttgcttcttccaaaataccatggaattatagatcgactgaatgagctctgtttgaaactttaagtctttacgtttgtgtgtgtgtgtgtgtgtgtgtgtgtgtgtgtgtgtgtgtgtgtgttttggcatatatgtgccacagcatggaatggggtcagagacagtttgggaccttttatgggttttaaggatcagactcaggttgtcatgcttgtagggcaagtcttttacctggtgagccacctcccccatccccctctccttgtatttatggatgatgccccttcaagaaagccctttattatttttatactggtgatacaacccagggccttgtgtatgctaagcacacacttaccatttggccattattttatccttatttttttttcctttttcttgtttagaaaatcaagtcctttaagataatggttaggatatattactaagttttttattttgttttaaattgaagagtaatgaacttgttatgggaagcctgctagagaagaccactcagacacagtctatagccaattgaaaaatctttattccaactggctgaggctacacttaggtatttgggacccaagtgtagtgctgaacatttagagttgtgtttttaaaagcaaaaatcttgttctggtatctcactcagcagttgcagcgtggcaggtagtttagggtgggagaagtttgcacaagcaagcagtttaacagaagctagataagcaattagctggggtggcaggggttggggggacgtttgtttacataagcagaccaattaccagaaactaaggtaagttagctgggcatcttgacctcaggatcctaaaatagagttggataattttccatagggcttctcatcaaaggagatcaaatcctaattaaacctaaaatggcctcagcaagaataacaagatgaaggaacctctgcactgtcttgccctgtcacaaattaaattaacattttctcaggtgatgtagggcaggacgaggaaaagggtgcacaagatgcagggacaattaagataaagttgttgggttctaaggatgaggatcaaagagaagagtacatctaacgtagggatgaatgtcagtggtaggtgtttgtttgcctaggaagtgaaagactctgctgagttcaggagaagcaaggaaaggaagattaggtgagttactgaatgttgtatagcagctgagtttttcttgggtgactttaaagccatataacttccctctctgctttgttttcctcttcaaggaaaaacagcaacttcagcctatctaagctttattatatttattatatacactaggcataggttgtaagggtctttgattcacagaagaatgataacccgggctaaaatagtatgtaaatgcaaagagtgttttattttgcataagtccagcattctggggtctcccactaccaagagagacccccctgaaatgaacttgcaggcccagtttgtagcacattaggggaattccaggtaggtggtccattacagaggcatgggggctggctggaaactcctgacccattgtccttgtttcaggccaagtggtggggcagtttctgattagctacctgaagcttgggtttttaggccttatctcctaaactgccaatcggaagtctgtcatcagcctagccttctcaaggtgtaacagaaacatgagtaggactctagttctgcccccaaggaagttagaaaagcattaccagagccaatctaaacaggcctgggcaggaatgggacaagttttctgaaatcctgatatcccagctatgttgacatgagatgttagcaaaaggaagatgagagatctttcaatgaggacggaaacaggagctttgagatgagggcctgtatacttgtagatgaggtcttagggaacagggtagagccaggtaatattgttagcattatttctgctttatcttcagtgggtgagccattggaagacttagcaggataatgacaccaggttgcttagaaagaaatcatttgtggttgaatctgttagatttaaccaaagggtctagaggtgggggaatacatctgtgaagctctggcagcagataatgaaggttggaccatggcaggagttaagtgggagtgacagggacaaatctgagagctagcagcagatgatataatgacaagaagtcacgagtcattgtgggaatttctagcaggggtgattggttaagtaatgctaccatgtttgagagaagacacactaaaagaaagaattgtatttaagataatgagagggtgaatggcttattttaagcatcaggaccttgatttatctttgagaagaattgaattatttgcattatgtggtggtgtaagtgaaaatggctccccataggctcttgtatttgaatactttgtccccagttggtgtaaatgttggggaaggcctaggatgtgtggccttattggaggaggtgtgtcactggggttggattttgaggtttcaaaaagtccaagccattctgccttgtacttattgatcagatataagctctcagctactgttccgatgccatgcctgtgatagatttctgaggtagcataaagagacaggaggtttaaaaagacacgagcctattctttgacagtcaggactatatttattagtgtacacaatgagggcctgactctcctgnnnnnnnnnnnnnnnnnnnngggggaatggctgcaactcttatggggcagggtaaggggtggaagtggttgcagcaagtgacacatgtttctctccttcctgaagttgtttgtcaaggtgatacaggctaccaaatagatgctccttgccagggtgaccaactaaggccgggcatgattatctgtaaccttgtaggaatgccatttaacagatgaggcactctgtcagcctgcctgctgcctgctgctttgctccctgccatggtgataatggactcactctcagaactggaagccccacattcaatgcttttggtttgttttttttctctctctctctttttttttttttattacgtattttcctcaattacttttccaatgctatcccaaaagcctcccacaccctcccccccactcccctacccacccattcccattttttggccctggcgttcccctgtactgaggcatataaagtttgcctgtccagtgggtctctctttccagtgatgacgggtttagtgcagagttctatcagaccttcagagaagatctaattccagttctgcacaaactatttcacaaaatagaagtagaaggtactctacccaactcattttatgaagccacaattactctgatacctaaaccacagaaagatccaacaaagatagagaacttcagaccaatttctcttatgaatatcgatgcaaaaatactcaataaaattctcactaaccaaatccaagaacacattaaagcaatcatccatcctgaccaagtaggttttattccagggatgcagagatggtttaatatacgaaaatcaatgcttttgtatacgttgccttaatcatggtcttttcacagcagtatagacaaatgcctacataaaagcgtttcacagagctatttgagtgtgaaattaaatatggtctaactagtactattaatgtgaaagtagtttggtttggtttggttttgacataggttttctctattatgtagctccaggtgtcctgtaatttgctgtgtagaccaggctggcctaaaaactcacagagatctgcctgcctctgccacctgagtgctggggttaaaggtgttcaccacaaggacctgcttggtgtggaagtacttagtctagggaaatcgttaatcatcagagagaatgtgcctgagagagaggcagagatgcaacgtttggatctgggcatatgtaaaggcaggcaagaaagagaaggttaaaaaatgatggtctggaagctaagagattggggcttcccaggaaagcctcatttaaaagtgtcaactggggccaggcagagtggtccacacctttaatacaaatacttgggaggcagaagcaggaggatctctgtagagttttaagaccagcctgctgtacatgctgagttccaggccaaccagaactacatagtgagaccttgtctcaaagttaaatatactccggcatggaggtgtacacctgcagtggatgggagactggaaaatcccaagtttgaggccagcctgggttatatagcaataacctgtatcaacacatacttaaaaagaaaaagaagccagtgtggtggcacacgcctttaatgccagcacccgggaggcagaggcagaggcagaggcagaggcagaggcagaggcagaggcagaggcagaggcagaggcagaggcagaggcgcagagaggcagagaggcagagaggcgcagagaggcgcagagagggacagagaggcgcagagaggcagagagaggcagagagaggcagagagagggaggcagagaggcagagaggcagagaggcagagagagaggcagagagagaggcagagaggcatagaggcagaggcagaggcagaggcaggtgaatatctgagttccaggacagccagggctacacagagaaaccctgtctcaacaaacaaacaaaacaacaaaaaaaaagaaaaaagaaaaaaagaaatgaggggagaggaagcagaggggcaggggaagaagaaagagtgagaaggtgggccagagagactgactggcctagagaaagtcaaaggtaagatgaagaccaaacgcagtgttgagcgtggccctcttaattgtttttgtttttattttttgagacaaggtcatactgtagacctcttgcctcattttccccagtcctgggattataagaatatgctaacatgcctagaaagacttggtttttaaggtaagactgtttttttttttttttttttaaatatgggacacttcatgaatttacatgtcatccttgtgcaggggccatgctaatcttctctgtatgattctaagtttagtatatgggctacatgagcgagcacaaactgttcttaatgagagatggttctagattgtagtgggttgaaaataaatatgaggtaggcctactcttaggaaaatttgtgtaaagagtagagagggtcatggtaatgactaaagactgattccaatgagttcattttaagggaggagaaaatgaagcttatttataaaattcccgatgggcaaattattcagaaaaggagagtagctgactggttctgagtatctggattggcctcaatcagattagcagctaagattggaatattgacagggtagaggaaaatcattgaaagaaaaccttccagaagatctctctcttttttttaaagatttatttatttattatatgtaagtacactgtagctatcttcagacacaccagaagagggagtcatatctttttatggatggttgtgagctaccatgtggttgctgggatttgaactcaggaccttcggaagaacagtcagtgctcttaaccactgagccatctcaccagctcccagaagatctcttgaatgaatgaatgaatgaatgaataagcaaggaagcaggcaaataaataagcgaatgaatgaatgaatggctgagtagatggctcaatgatttagagcacgttttgtttttgcataggactgggtttgattcctagcattcatgtggtggcttacaaccatcggtaagagacttcaatgccttcttctgacttctgcagacacctttgtaccctctgtatgtacatggcacacatacaatgcaggcaaaacactcctacatataaatttaaaagtgtgtgtgtgtgtgtgagagagagagagagagagagagagagagagagagagagacatgatgctgatgctgataagacccttgaggatggtgaagcaggtcgttcggaatgggaaacgtacttgtcttccagatgaagactgacagggcctactcaaaagtagagaagaaaacaatgccagtcatttcagcgtgctcatgctgtggagcactacacagctgtaggaatcggctgcttagaagtagactccaacctaaatgatgaacgaaaagggaaggaggcctgaggaagtagggcttcccattgtaagagccagtagtagaaataagatgcgaaatggtatgtgggggcagagacttcacagctgtgttgctagttggtaggaagctctctctgggtgtttaatctctgaggattataaagagaaaggaggagctaatgacacctgtgatgacatatgtagaggccaaggagttctcttcatggcacacagctgtctctggtggaaactggggtgatggtggtagcagtggggggtgggggtggggaagctgtgctttttacttctcacttttctgccttctgtagtctgctgttagaattgggttttacaccataaaaatgaagcccgtttatgtgtctccccaggaatactgacagagcctagagttctggaacttactctgcctaagcctgcctgacgtgagtctgcctgtccgagcactgggctcttccctggaagagggactgcccaccacatctttcaattctcctcgtttgcttcataccagttctaaagattgccagcatctagtgtctgaatgttgggtagaaaaaaaagcaatgaattgctttcctattcttttgagattaaccccaggccttacaacttagaaagcaccatcctaaaagcaacttctttataataaaggccaaagaatttcttgttgtattcccagtatatcaagacattaatgcaagaggaaggcaggctacatttctcctgttttccctcagcctcaacaaaagatcccctattcttcagtggaaacttagcgtcaaggggtctcgagagatgactgagtcaggctagtgagtcctgaacactctgacctgctactcttttgtgctgtgtttgtctagggtgtctgcagtaggaagaaaaaaaacaaaaacagtttctgttgttgagctagcctgtgcccagcatcctggtctctaagctacaggtggcactgatagagttgtcatgagcatccaacctcacctgtgctgattagttactgaccgttgttttaaaatatttgcctccacattacaagtggttaaatgttaacttcttaagaatacaagatagctccgcaggatatgagttatgacatttagggtgttgacttattgcttcagaactgtggagtttttgagtaatacaccatgttacatgatttgactaaaaaaaaaaaagcctcaagttggtttcattggcttaaatatagttcaaagcagtagacacagagctcagatgaggaagtgctgtacaatcaaggaagtaagaggctttaaagataatttgctttcatggacatggctgtccaagttctgatagatgacttgaaataagagtagaagtactggaatagagatcctctattctaaattaggagaggagtgtggggaccctgaatgtgacaacctctaagtctctgctgactttgcagaggtgggcttgtgtgggtaaagtgacggacggacagacggagaagaaaaggacctgacaccacgaactagcaccatacggggtattgttttatttctgcatttgttttctgtttcatctgtctttctcaggtatttaaaatataaaagatatttgtttaaattctcataagttctcaaggacctttttgtctttgctgtgtttggaaagatgccatgataactagtcaaaagaattgttcttatttattaacctgtaacttaaaagaaaataggaggccattctttggtttggttttatttttcattttagggaaaggatcttaagtaagtcgcaacctttaactgtgctaattaaaatctcccttcagcagagagcagtggttttgagtctctttatagatatgtgtctaattattgactgcatttgaaagtaacttaatggtcctgtggtttcagagtgaagggcattgtaaaaaggcagctgtgctctgggtttggcatcattcatgcattttaggtccggtgcagaattacactgggaaagacttgagtcatgcttttttggtattgtgttatattaattttttgtttgtttgttttgattttcaaaacacagtttctctatgtggctctggctgtcccggacctggctctataaaccaggttcgcctcaaaatcagagatcgcctgcctctggctcctgaatgttagaagtaaacgcttgtgcagtcatacccatcatgttaaattagtgtttagccataaattctgcctgtgatctttgaaaagagaaatgtactgtttttatatttagtccttgctgtctacaactaatcaaagaattgttctctattcattaacctgtaaaactgtttaaaagaaaaaagtagaccattattttgttttgttttgcttgtcttttgttttgtttggtttttttctttcttttttttttttttttttgtttcgttttgtttgttttttttcaagacagggtttctctgtatagccctggctgtcctggaactcactttatagaccaggctggtctggaactcagaaatccacctgcctctgcctcccaagtgctgggattaaaggtgtgcgccaccattgtccagcgtcttttttacttttgagacaaagtctatgtaggtcctgaaactggctgtgtagaataggctgaccttgaactcacaaatctgcctgcctcggtctcctgagtgctaggattaaagatgtacaccaccatgcccagcctattcatttttctctatcactgagctataactcctgacgtggccatttttaaatttgggaattagcactgagctattagtaatagacttgagaaaatgtgtagcagccatattttttccctctttgagtcaaggtcttatgtagcccaggctgcctcagatttgttaatggagctgagaatgaccttgatcttctgcccttacctctcaagtgctggggttacagctgggtgccactgcaactatgtcatgagtgcagggcttcgtgtatgctagggaagcatgcttcaacagagtcatagctccattccagttgtcataatttgcaagttattattcactaatgcatagacccaagtgtgtgtgtgtatctgaaagggatgtgataggtggtggtatggataaataagacaactatgggagtgatgataagtttgcttaggaggaataccctggcctccctttgagtgaattatttggaaacagtttgagtggagaagaaggaaaaaggattggaatccaatcctataacatgatcccaagatcactaagttagctactgaaacatacacacagaaatcaagaacacacttgctaaatgctgttttaggccttaaaagcctaagagggggatttcctttggccacgttacagatgaagcattttgacctccaagtgaagaaacttgtcaggctaacaagagaccaggctagaattctgatctaggcagcctccccacccctttgctgcatgataagaagtgaaaagatgggaggattcctttctctgaacttgtatgtggtcagctgagtttccagtgcctattccaagtccattcagtaaatggggcttgttaactacatatcaagagtgatgtagcacgagccccatatgcacttcaagttttttagtagcagtattcaaaatgcaaagaaaaggggtaggtgaaataattttcataatatacttatttagctcagaatgtcaaactgtcaagctatatagatgggtaagtggccaataataagtatttttaaattattaagatagtctgatctatattcttatactacagcacatctcaattcagattagctacattttaagttgaactgtggtatgtggctacaaattaaaaaacagaactccaagaaaaggacagtcatcctacaacagagagccagctttaaagcctctgtgactatgggagcagctttacctaacttgatagctctggaggaaaggtcccctaccgagaaggctgggctgctctgtaaggaaagagtttgaccatatcaaacagacaatagaccttccgcctgaggactatttatagagagcaaagtctgaacccctttatcacccccaccagaaacaacctcaggaaaaccacgctgttggctcttagatactgaactatatttggggtagcagagtgtgtgtgctggagagtctgctagctgagtccagtcaagactggaaaccacagcctttgatgcatgtggcagtgttgttgcctaaggttttcctcctcctgctgttttgagatggaaacagtaatgtctgcctaaaaagagaaatgtgaacaaactactgtataaggaaatgtccagcccttactctgcctggagcgatgtaaatgacagtttcaagccatctccgtccagagatcatcttgcatatataagttctccagtccagccatgttttttactctaagaaaggttggcatttctcgttcatcttcttgctcctgtggctcttgttcctttgtctttgactcaatgaacctctctcttttccaattatatttgctgtttggggtttggttttttttgttgctttgtagtattggtacacaaacaaacaaacaaaatccatctctcaccttaaaggaaagaaagatagctctttttttttttttcctggagtgttttaagtgaccatagcttgggaaaacagatttaggttactgtagttttatacttttaaaaaacaaagaaaattataaatcagggcaagggggttgcaacatgatgagggaagcttgtctataggcctaagattctgatgacattcttagcttttgagtcagagggtgatagcagtctgctaaattaatagattccaagagtttttttttttttttttttaatctgttagtcacaagatgttagttctgaaatagaggcaggtcaggaatggttgttgggagatggagggagacctaaagctagcccaagataaggtaattatttcttggaccatcagtcagtcagtctttaaaggcagcttctttcccagagttcttattcacagtagtaagctatctgcgaagagcttgagtcttgcttatgcttctcttaagagtgggacgtgtaactgtggttaaaagcgtgacgagatcaggtggggtggttcagaagttctaggtaaacctagcaaaggttggcggtgggggctcagataacatacaaggaaagtatatgaagctcctagtggttatatgagcaataaatagttgctgagggagcaaagactctttggtggatgttgcctgtgccccagacagctcttcgcccaaccctacttttccttgggggttgggggtgagttggcgcagagtcaaggacgcagactctgggatcaggtgagaatgctgcagcaagctcctttaataccttccactcactcccccattagtcccaagaaagcctctcttctaaacagcagttcctgattggctggcattgtttgcatcagcaaaccttgctctctcaggcagtcctcaatttaagccctcctgcaggagatgcttttgcagctgcagagccccccccccccccccccnnnnnnnnnnnnnnnnnnnntgcttacatagaggcagccccgctcttcctgctacaggtggaacatccagtaatacagctttagtccatttcacgaacactttgtagacagctccaataaactcttgttgagccactttggtctatcttgagtacctatttggagtaaattctgtagtttgccatttgaagtttacttttactttaacacacatgatgtgtgtttgatacccatggaaggcagaagagggtgttgcatcccctggcactgaagttacagacagttgtgagctgtcatgtggctactagaaatccatcctggacctctgttggggacagtagctgagccatctcctctgctcccatgggaatgatgtgtaagttcaggaatagtaagtaagcagactcacgctgttgtacagctctcctcagcatgcttctccagcgctcctcagcttcccacactcagccactgcttgggactgaaagtcttgagagttgctgagtagtcattttcaattccctaccccacacccctgtccctgatacacctaccttttatctttatgtatttggttataatagatacctctagaaagtggaaacatgtagtatttatcccgtagtaacctggtttgggtttttgtttttaatttggtggagaaaggtcttcaaggtccacccatgaatcacatgtgagaatttcctttcttacaggcagtcatattccatcatttttctgtagcacatcttacttattcattcttacgttgttggaaccttttagattttttttccttcctgagacagatcttaagtgtaaactgctcttgaactcactgtaacccaggctggcttcacactcagaatcccctcacccacacttcagctttctgagtgctgagagtacaggtgtgtgacttttagctattgaattgttctcaccttagtgattctttgagtaaattctaatttcagcttttgtgaatgatgctccctggggaaaatggcgggcaactatctctaagaactctggagtattatccagaggtagaatccctgagaacagtggtcgattttctgtttcgttttgtttgataatgagtgggattaatatctcattatagttttgtttttctaggaaaaatacagaatatcattatctgcacctgtttcttttttggtttttggagacagagtttctctgtgtcgccctggctgtcctggaactcactctgtagaccagactggcctcgaactcagaaatctgcctgcctctgcctcctgagtgctgggattaaaggtgtgcgccgccactgcctggcttctgcacctgtttcttgtcctgttaagaagctaagctcattttgtttagatcttttgcccattttttttgttgttgttattgtctatctggttgttggtgtagaatgtgtgtattctaggtagcaatcccttctaatatatatgactttcagatacgtcttccaagcctattggttgtcagtgctgggaattgagcagggcccaggaagagctctcaactgctcaaccctctctagcccttaaaaaattgttttaaatgtattgataacggatacagatgaacgagttgccttgtgataccttgtgatttatgtatacagttttatgtacaaatcaggttgacatcagtctcctcagtctcctcatcgcttccttattttcactgggttttcattaccacacagagtgatggattttattgtggcgttttcattcatactttgttttgttgaccctctgttcacccccttcccttgtgatcttccctcatgcacgttcactttcccagtaaccttgtctctgcttggacgtctcatgtatatcatatgtattctgttttcctcctttccccactacctttcccttcctcctgtctaggacgtagttaacctcttcaaacgaaagttttcctgtagtgttttttgtagagctgaatttgtagatagacattgcttacatgtattctcatgtaatatttttctttttttttttttttttatcagttgtgattgatggcctttctggttatagaagtctcccagcacccacatggtggctcacaacgctctataataactccagtaccaaagaatctaacgccctcttttggcctctgcaggcagcagtcatgcgcatggtttatgcgcatatacacagacaaacaaatacacacacaaaaagaaaaaacttaaaaaggcataaaggggataaagacagggacagggcagggctgagaggtgaggaggaaggggaaactggatgcaaagttagttgattgattaattaattagtaaaaataatcaaagacatataggaacttcacagaaaatacgtacaaaaagaaaatctctccaaacgtgggagagagtatgcatttgtgtgtatatctgtgaaatggatagaggccagcatttagtatctggtattccccctgtaattgtatgccttattttttcagaagtgtctttcactgaatctggagtttgcagtttcctagacgacctggccagcacatccctctgtctctatctctaactcctcctcggtgctcgaactaacagctgtgtgctggcacatccagcttctacaatggctattaggaatccatactgagatcttttttgctgttgtttgtttgttcgtttggttttttgagacagggtttctctggctgccctgaaactccatctgtagacaggcagggctcaagctcagaggtccatactcagatcttaatgcttgaacagcaagcacttttcctattgagccatcttcctagatctatgatgattgcacttcttattttttacattaaatttatttatttgtatgtgggagggggacataaggggcacagcatgagtgtagagatcagagaagtatctctccttccagcatatgaattctgacattaaacaacagtcaccagacctagaagtatgtaccttttgcacactgagctgtctcgctgaagttcttttctataaagccttctattaaatggaacacttaaaatgttatatcttgatcattgaaaagtagcagattcacaaacaggcaccagagggtgctgtttcctatcattgactgggctaagtacttgcttggttgtgtttgcctttacacaaacagttcctttcctacattactgaatgtttttgtacactttttgggtttttttttttctgtccataatgcaaagaaatgttgtttgaatcctcacataaattctgtaaattgcaagttaacgtatttttaggttttgtttgtttgtttgtttgtttttaatgtccattggtattttgcctgcatatatgtctgtgtgaggatcttagatcccttaggtcccctggagctggagtggcagacagttgtaagctgccatgtgcttgctgggaattgaacctaggttcttattggaagagctgccagtgctcttaactgctaagccatatctccagcccacagattaacttctaagtagtcctttggtattcttatttactgtcagttgtttgtttgtttgttttttatcatcatcatacctactcattggtatctgctctataaaagtcagtgtactgggaatcttacaaatgttgaatttttttttttttttttttttttgtaattttgtaattttgttctagccaggcacaacacacctttattcccaccactcaggagacagagccaggaggagttccagaccagccaagttcgtttcaaaataaataaatcaaacagggttttactacataggcccagactagtctccagttctgattcgtggcctccgagtgctggagttatatgtgaacaacaccacaccctgttagatgtgttttagaccaagagatttgagcggttttgttgttgctttgaagcacagtcttcaaggttgcccagctggtcttgccactgaacttcaccttttacctctgcagtagtcctcggaggtgcaccagtgtacagagcacactacacaggtaggtagctgccgcaagctcctcctgccagtcagtctgccagtgtacagttcatggaaaactaaattagataatgactttcgccattcagtagattgtaaagtaacctccctcaggtgggtcatggatgtgatttgaaagtcttagaaagctctttctaccccaaaataaattttaccgtggttcagtttctttgtttctagtcacaatatgactaccaagtgaagatgttttgtgaggaatttgtagttttaaaaattaatactttttatgttaaattactttatggtttgtggggggttggttttgttttgttaggtatttttattttttgccaaactttagtagaatagaagttactgttttatgtcctagaaagaaaataagcttaatttgtgctgtgtttgggaggagagattgaagctgaggtctctagatactgaacattccatgtcagataacactgctagtttggaaatttatttaggattaattaagccttgctcactggataccagaagcctggggaggtatgactcatttaaggaaaaggaggaagtttatattctccaagaggagtaggcttttttttttttttggttggttgtgttttgggttgttgtcgtcctactcagctgtatggcttgtagtgctatctactaagtagtgaggctccttggcctgggtactcatcagcccgcctgtttcttctcttatgtttgtaccagtgcaggtgtaggtgaggctgaggaccagtttttcttttcataaacctagccctgggtctttcaagcattaaatgactgtgtggtctttgggacattccttctctaagtgtggtatccagtgtttacatctgctaaagaaaagaaaaaaaaatctgataactggatgcacttaaaatatttagcatccagagttttccaaaagtttggtaacccttgccataggaaacactgaaaactaaagtgagacagcccgtgatttggaaggagaggaaggactgtgctcggagaagaaggccagactcatacaggcctagagggctgttgtcacatatagagtggagtggctttggtatgtcctaaggcttcatgctgagcatcagcaactccaggtcttgacaggcctgtatacctggaatccctgcattcaagagtgagacaagaggagaaaaagaggcaaagcaaaaagagatggagaccacagtctacatttttaagaagttcactgaagtaagactctataggaagtcagccaccttgtctggcagattgtgtctttgtgaaccaagggccctgttttgtaagtttcagttacagtatggacatgtgctggtatatatctgtagacataactaaaataagcctcacaatctaaattcctcctcgtgtttctatgaagttcctgaacttgagttacccagcaaatacttgttgtctacaagctgtttgccacactctagggatcattgaggaaaatggcccctcagtgagcatcgtatggtgggacaaatgtaagggtgtttcctgtgacgttcagtgaaatctcagccaagagctcccactgcctcattgggaaggctccagagaatgggaacagcatgaaccgtgagttcatttggatagagaatagcagagtcaatagctgtgctgatctggggtacagtgaggaagaagccagttagttgttggaagaagcaggtaaatctctgagttcaagaccagctttgtctatatagtgattttcaggccaagaccacatagtgataccttgtctccaaaaaaaaaaaaaaaaaaaaggtattaagtttcagggaaaagaggggaatactaaaatttacatgtggattagtaatactgtgcacaaagtttctatattcttttgttgttgtttgttttgttttatttttcgagacaaggtttctctgtttctctgtgtagccctggctgtcctggaactcactctgtagaccaggctggcctcgaactcagaaatccgcctgcttctgcctcccaagtgccgggattaaaggcatgccaccaccactgcccaacttctatattcttttcatattatttacttactggttttaaagtgtgtatgtaagcccttatttactacttagttatgcttaaaagcaaggcttcccttttgttcttacttgttttgtttgtttgtttttccagacagtgtttctcagtgtagctctggctgtcttagaactcacctagtaagtacatctcactcagaggtctgcctaccttggcctcccgaatactgggattaaagacatgcgctactaccacccagcttctcacgttgatttttttcattttatactgcccaataagtttcatattactgttcctttacatgagttccttatttaaatcttctgtttggaagttgcatagttggaaattaataggctaactggatgatggtggtgttttcagtgctgagccttggtatggttagcaagcactctaagatacacccctaccccaaaatatgtttttagaattgattatgtatcaaatggtggctctttgtgtttctactcatgcagtaataatttgaacattaacataacagtgctggttttctgaaaagtgtgtgcttgtactatctgtgggagccacatggtggcagaaagaacacttagaaatggaagccttgcataggcttgactttgtgtgtttattttggctcgctctagtatagagactcacagggtctcactctagtccaggctggcctcaaaatcactgtgtagtccaggctggcttcaaattctggtgatcctcttgtcatagcacccatagtgtcagagctataggcaggagccaccaggctggtttcatttctttgcaatagaagttaataaaaaataacttctaagcattcttaagatgcatcagccatcttaagtaaaatatcacaaatgtacttgaaagctctttgcatactttcttctatttagctggtctccctgtgcttttcctccaggagacaactctattgaatttagcctgtcacctctatgcatgcctttatggttttgttacatatttatatttttaaatagtaacataggttgtttctttattatgattttatatactgtatacttttgtgttaataagcaagctgcagtgaattagtttgttgttgttgctatttgatactatgttgaagaaactataacctttaaaattaagttccttattttgagagaggcaacatggtgctgtggttataaataaggcctctgtgcccattcagatcctgctactatcacatggcagttttaggccttattcctgcttatacaaaataggataccactcaggattaaatcaactaaagtgtaaagcattaacatcatgattgttgcgatctgctgtctttaataccacagttctataaacttagcatggagtggattttgtgttgtttactgagccccagtggaatagaggtcatcttgcagtacaagaatagtgagtagtgggaaataggccttgagggcagttgtggtggttaccttcggaagatggatactttctctacagtagaaggggtcatctactaagagtggaaaatcagggtgtgacaggaatggaggattggggagagctgttcaggattcgaagtgttcttgttcaggacatgattcagctagaagcaggtaaaggaatcacccatgtaagtgtatgtgctattcttgattgtgtggatttattcttagcaacatgttgccctgaaaaagcctgaaccctgctccaatcccaacacacacacacacacacacacacacactgaatgcctctattctgctcctgtagcttatactgttgtgtgaaggaccatcaaattctgcatctccacgtttataatcctttccatcctgaattcacactctttatagcttttttccacatgacatgtaaatcatgtggtctagagtcaaaatagaattctgaactccccagtttatgagtctccgcacctgctctttattccctgaggcactccttactcctccacttagaaggatctctcctctttcttagtgacctccttttggaatttagcatgtccttgaatgtactatgtctgatcttagtcaagatatgtgccattgtgttgagagttaacatcctcagaggcctcattagagaaagctgttaagaaaatattgtaatacaaacaagaaatggctcttctgcactctcactgcctgcatgtcgttgctctgtggctgaacttgtttcacattctttttcttcttttaattaaatatttagaagcagaagcagatatcaggtactgtcttggtatgtatcagagttggactctgagatggatgctttattataaaaccacatactgctgtcctgcctgacaaaaagagcagagatgcctcagcattatttaatgcctgctttgtaatcacatcccccacttgttttaagaatatgcttctattgttggcttgtttaaactggtatctaaacagactatattagtttaataatatatttgattgctaggaccctatctcaaaaacaagtgaatatatcaaaggaaagagcactctagggatcaaacccggttccttatacttgcaaggtaatgaatgcttagccctctgagtcatctctgtgcctcaaccacaccttgtgagacagggtctgacctagccgggctgacctggcactcagccatgcaccaaggatgattttgaacttctaatccctctgctgccacctgtccagcactgggcaccaccattcccagtttttacgtggtaccagggttagaacccacaattctgtccatactagacaagcactcaaccaacttagatcgcctggtaaattttgtggacttataaaaacttttattagattcggagtaggccttaaatgctagctttcaatgggcaagattatggctacatgaaagtacagctcaggctgtacttcaccaggtctgttttgttgctatgtgcatgaaagaatgtgaagaaaaatgttaacaatgccagagcctgctacctccctctctgcccctcctagtctgttaccttggcttctccaccttgcttcctggtgcagcccacaccctttttgcagtttttatcactcctatcctggctctagctgctgtcctccctatcctgctgcttattgtttagtaatatagatgatcccatgttgtttagaagatgtgtttctgactcagtcaaattcctgtgaacttttagttttgattgtgtatgtctgtgtgtgtgcatgccatggtacatgtaagggatgttgtactaacttttctgttgctgtgacaaaacaccacgatcaaggcaacttacaaaacacagtgttggattgggcttatgatttcagaggacttagtgtctgtgatggcagagccagagcatggcagcagaaacagctgagagctcacattttgatctataagcaggagacagggaggaacactggaagtggcaccaatcttctgaaacctcaaagcccttcctactggctcttcccagcagttccaccaactggggaccaagcattcaaatatatgagcctagggtgtgtgtgtgagggaattcttactcagaccaccacaaagcacaacttacaggaatccgttctcttcttcctgggtcctagggaatcaaactcaggtccttaagtttcatacaagtacctttacctcaccagcactccatgagcttttgatggctgtttttgatggctggtccacttggatgtgtcttataaagtttgataaaggaaacttttacagagttcagaggcattggcaacattatccacaggtggatcacattttttggtgatttttttcccccctgttctggacagtgtttctaatagttgatattgccttcttgtctgtctgtctttccttccttccttctttctttccatccttccttcctctctcttgcccctcccctctttttctttaagacagggtctcactgtatagcactggctgacttggaattcccagtgtataccagactggcctcaaactcacagaaacccacccgtttctgttccccacactagcgttttgtatgttctggccctagttactttgcccttgaacccactggcaatggtactgaattgttggatccgcagcactggatctcatgacagagcactcctgagagaccttatttaggaagaccttatgcttgacaaataaatataagatgaatgagtgttgaaaataatgtaaaacactaattttgctttattaaagtatgtttttaagatatttttattcttttttagttatgtttaagagagtgtatgtgcacatgagtgcaggtacccatgaggccagaggtgttggctcccctggagctggagttgcaagtagttgtgagttgcctggcatgagtattaagaactaaagttggtccagggtaagtgaagtaagtgccgtctctccagctcataatgaggtttcttttttgttttggtttgttttcattatcttatgagataaaaacttaggctaaaagaggatttgtctctatcaaatccatagttagttataaaacaaaattatttttattgcatatcacatagagaaactaatgggctgaaattgcacagctgttcatatagtttatagaccttctggaccagcataaaagatgctggtaatgaaccttggttaattacagttctgcatagatgctgctttgtagctcctgttactataaggagaagaaatagataatcccttaacactaatgaccacttcgatggttgggtttcagttaggcttcttcccctcttgtgcctgaagggggatgtcattgtaacagaatgctgaaaactgtaagttgacaagttagatgaatatttaggcaaatttttagtcttaccatatttacacttgtggaaggtattgttcaaatctacagttttatagactctgaaatttcatgaaatacactctaaaactatagtttgtatatctttcaaaatctcaggggctagagcagtagctcagcagttgagagcacttattgcttgtcttaggtttctattgctgtgaagagagactatgactacagtagctcttataaaggaaagcattcagttggggctcacttacagtttcagaggttttgtgcattatagtcttggtgggaaacatggcagagtgcagacagagtatggcagagttctggaggcagagtcaagagtactgtatctgtcaaaaaaacaaaacaaatgaagagtactatatctggatttgcaggcagcaaggagaaactatgtcacactgcccagacttgagtttataagacctcaaagcccacacccagtgacatacttcctctaagaaggccacaccttctaatagagccattccctatggatcaagcattcacacacacaaaccacacatacaccactcactctctggaagtcgttcctattcaaaccaccacattgctctaacaaaggaccctggtttaatttctaacacccacatgatggtttaaaccatctgtaattccaattccagggagtctgacaccatcttctggcttcatgagcaccaggcatgcatgtggtataggttcatgcaggcaaaacaaaataaataaatgaaattttaaattccacttagaaaatatggaatactaagagcaaaacatttcaaaactctaagggaacaagcaggctatcatgagtttgaggctagtctgaactacatagtatgatcctgtctcaggaaaacaactaaataccaaatagtgatactacgttgttttgaacacagaagggagcacagggtccatagaacaagggggtttgattagcctatgagatatctaaaggcttcctactttgcccaagatatagtggggtgagtaggagctaaccctgctagaatccttttactagacttacaggctgcattggagaaaccaggaaatgagagaaatagtctgtcctaagaactgcctggagtcaagaccaaggagccaggagcaggctctgctggcaccagataacacacctcattttctttgtttatactgttataaaggcagtggagccagggaaaggtttttaagaagggtcaataagcaatcgacctgcgttttaaaagatcagtttgaatagattagaagattggtggctgggagaaatttagagcaggcaagagaaacttttcccaaacagcattagcccactgctgagcagacagataccaaatgaacacctggtgaagtttaaaagacccacactgggagttggaggtgttcagaaaagggagaaacaaatgtatatatagggaagatctgaagaattatctgtagggttttgaaggaatctgtttgtaacactgttataaaatgtagtactcacatgcattttctgtgagaaacttttatcagattcacaaaaggtccctggctcccagaagatgaaaagctatgtgaaaagcttgggtagtagtcagcctgagagaagaatggtcttgcacagcagtagaactttgtatttaatcattccagtcaggagcttaaattaaaactacacaagaaactgtcagcatggatggcagcggttggtattactttagagcggattgatatttcatgcctgatccaacaagaatctaggaagctaggaaggacagaatggtatggaaagttgtaatgaggctcatgcaacaaacagcgcaggtggaaaactctggctggagcagctggcggggaccattgttctctctagccagtaggagcaggagagagttaggaattttatgaagtgatcactattacaagtgttcaaggaaaggttaggaatcctacactgaatgcaaggctgaaatggcagtcagaatcttgagaatgcagaaatggaaagctttctatttagagtcacgtggggaagtctagacctctctgcactgtaaaaagtatgcaaagacgataacttgaaactgaaaacctttgaattatatctgaacagaaaacttaggcacagttggtaactatttttcaatgggaaagtgtatttgaagggaaaaaaagaactagggtctgaagatatgcagctcaggtctgagggatggggctggtaaaaagcttgattaacatacaagaatacccagcattgtataaaccaggcaaccaggagtagttggtgtatgcacacccataatcctagcacctgcaggtggagatgggggataaggcattcagaaacatctttgcctacctaatgagtttagggccagtctgagatacatgagaccctgtcttcaaaaataaaagggggctggctgggcatgatggtgcacacctttaatccctgcagtttcgaggtagaggcaggcaggtctcttgagattgaaaccagcttggtctatatagcaagttcaagcccataaggccaacatagtacaagaccctgtctccagaaacaaagcaacaacaatttttttaaaagacccaagatcttctgtgttctactgtattatacactctactgtgnnnnnnnnnnnnnnnnnnnnnnnnnnnnnnnnnnnnnnnnnnnnnnnnnnnnnnnnnnnnnnnnnnnnnnnnnnnnnnnnnnnnnnnnnnnnnnnnnnnnnnnnnnnnnnnnnnnnnnnnnnnnnnnnnnnnnnnnnnnnnnnnnnnnnnnnnnnnnnnnnnnnnnnnnnnnnnnnnnnnnnnnnnnnnnnnnnnnnnnnnnnnnnnnnnnnnnnnnnnnnnnnnnnnnnnnnnnnnnnnnnnnnnnnnnnnnnnnnnnnnnnnnnnnnnnnnnnnnnnnnnnnnnnnnnnnnnnnnnnnnnnnnttttgtgactgtcttcacatccttttaaccacagactcttcatacaagatccatcccacacagttctgtttcctgtgtcagtagctttcaacaagctgtttccttgttggcagggttgcatcagtttaaaacaaagccaaacacccacctcttttaaaagtaatgctactggctacattatgctgttgaaacacatcttgtttcttagtgcctggtattgaacccagggccttgtacatgctaaccaaacactcttcaatgaactatactctcaagtccttttctgtattcttgttgagagcagtctaaaaggaaaagaacagtacaaagtgttcaaagagaaattttctagaaccatgaatcaagcttttggctaagaaatagccagcagcctgcctgtatttgtgctgtggtgtatgtcctgagagggacttaattggtctggtgggtggcaccctgcctgatgtactgtttacattattggagcaggtgacacagcatttcccatgtcctctgtgatctgcaaccccttcaccttgcttcccaagatcaaatgcatagataaatattggcatttataggctgacaacctggagataaatgttaccctgcagaggaggctgtgtaagttgggggttattcagcaagaatagacatagaatctgaaaatcatttaacagaatttagcagaagaaacactcttcctcccatttatgaatttttagtaatatttactggggagggggtggcctagacaccatcttctcttctaaggaggattcagaatgctgagagaggaaggaattggactgtttcctttggaattctgactcccctccaacccccagggaaaatgtcccaaagagctcctgatgaccaggcatttctttatactgacagctgtctgaaatgttaatggatttcctggcaaataaaacagggcagaccctcctttaagcattactttgctagagcttttccccaactttaattcagaagactcttagagagattttataaaggaattgctgtcattgttcataagaaatttgcttattggtgaccacgtgggccagtgtgggtcactgactccccctcccctaggtacagggcccagagataaggcaagtcatgtcttgctggggagggtgtgtacaacaagaaacaggaagctgtgtttcagccgactggcctggcctgctttgcctggagctttctaacccagagtcaggtgtgctgaggtccttcggcagaggacactgcctttctgagctggcaacgctcgctcgcctagcacaagtatccttaattgctgtgcagagaaaactatgaccacactacagcttaaggagctttcacagtcgggcctctaccggagaaggcgagagcgtcctgagagtctgagagtcaatgggcacgcagaggaagagctgaggtgagtgcagggttggctaagggtcaaggttcctctcggttgtagcgattgtgattatagcgggattcacagcctagtggatccctgttctttgggtaggagcctcttgtggccctggagcctgttcccactctcctcagctcttctccacacctgggctcctggtgcatctctaaatgcagctccagactagcttctcaacgggaaggaattgattttcccctgggggctagagctagcagtttgggtttatcagagcagatttttgtgagaaattagactttgagtatgtgtcaggtagtttgtagtatttggtgtgggggctgggtagggttcctaaggttgttattgaagtgatgtaacaaagaaatgttgtggaactactgaatatagtttagcagtgatggacatcaaaaatctggagaacaagttagcaaaagattnnnnnnnnnnnnnnnnnnnnnnnnnnnnnnnnnnnnnnnnnnnnnnnnnnnnnnnnnnnnnnnnnnnnnnnnnnnnnnnnnnnnnnnnnnnnnnnnnnnnnnnnnnnnnnnnnnnnnnnnnnnnnnnnnnnnnnnnnnnnnnnnnnnnnnnnnnnnnnnnnnnnnnnnnnnnnnnnnnnnnnnnnnnnnnnnnnnnnnnnnnnnnnnnnnnnnnnnnnnnnnnnnnnnnnnnnnnnnnnnnnnnnnnnnnnnnnnnnnnnnnnnnnnnnnnnnnnnnnnnnnnnnnnnnnntgttccctgttttcctgctgacagaaagctgcagtaaaaagaagcatttggaaaatataattttctgtatctagtgtaatttattcttgaattagagtatctgaatattctgaccagatggccgcgtgatatctataccttgcatttgttctctgttgacatggaagaaattgacaagcttttaaaacgtgtgtctcattatggtcagctatgtcacgagacctgtactttcagagagaaatgcctatttgaaaattattgactttctccaatttttgatgatcctgataacaaaagaactgttgtcaatgctggcaagtgtccatgcatgccttcttacggtgtaaagtgacttggcaacatttactgtattcacttggaaatcactggattcaacagaatgtaaaggcttctgagtttgaagtgttacacatttgacttgtaatctctccctgtgagaggagcagtccaaacccaggccctcatacatgctaggcaagaacgcccaacctacaagccctgtcacaggccagatttttgcactcagaattcaagagagaagttagcaaacaaacaaatagttgtaatttcagattgggttttcttagaatttcctgttttaaaaattcaagatctgtaaaatattttaaactgttttatacttattttcagacctaaaatacttatgtaatataagaggtagttcatttatataattatagtgatctttaaaacaactagaattgttttgtttgtttgtttgttttggtttctcgagacggggtttctctgtgtagtcctggctgtcctggaactcagaaatccgcttgcctttaccacccaagtgctgggatttttatcccctagaatttaaatgtagaaaaaaaaatgctgtctgttccaatgaattaaagaaaaatattttttctacccattttggttatgtagctccttggtgatgataacagtggtttgtgtttctgctgttcttgtctcctaatactgggaaaagcactttccatattgactgtgcagttaaaacagaaaaagtaggtaaggtagactttttaatgagtttagagagataggatttaccactcgttgtattgtagtattagttaagaagaattaggagagtaatgaagttaggtgtcccaagtttcagcacctcagatcttctaaaggagaataaaaacaagcgccaacagtatgtgccatttaccacgggagaagccctcatggccgtctctgcaaggcaagcagtatcttagaaatagtgcagagtggccccttggtattgcaaactttatatgccccagtacaggggaatgccagggccaagaagtgggagtgggtaggggagcagggcgaggggtcggggatatagggaacttttaggatagcatttgaaatttgaaatgtatataaagaaaatatctaattaaaaaaatagtgcagagcaataaagtatcatgatgttaagacatcatttatcccatttcaattgagtgcctactgtgtgtcaagtaaaggttcagggtgaatgagagagacatagcctctttatcagggaacacctgttggcataggaacagcagatgtcttccctaggagcagtgtttgagtaggtgaaatatcaagtatatttcatgttatcatactgttgctcaaagcccagctgcacttttgagtttatgttacatgctccctttcttggcagtgtgtgaactcttaacacaaactctgtggaggactagaaagggcaagggccactgccagaaaacatctttcttgtaattttaagtagaagactagtctaaaattaaaaagataaagttttaaaggattctgtagcaacatgaaaatagttctagtgttacacttgaaattgcttctgaaagatacatgtgaagagcgtcgtaacttctggctttactgatactcgttttaatgtgctagtaagacctggaagatcctttttgttgtgttatattgtgttgtgttttttgagagagtctcactataaagccttggctgcccaggaacttactcaatagaccaggctggcctagaacttacagagttgccagcctctgtctcctgacctaaaagttactttgtacctgtaatgtttctttttttttaaaagatttatttattattataaatatgtacactgttgctgtcttcagacacaccagaaaagggcatcagatctcattacagatggttgtgagccgccatgtggttgctgggatttgaactcaggacctttggaagagcagtaggtactcttacccgttgagccatctcgccagccccacctgtaatgtttctaactgcatttgagggccatggagattcaggaaatttaggaatcattctgagtttcagagtattgacccctttttcccagaaaaaaaatgtccatttccaaatagcatttccactatacacacacacacactctgtctctctctctctctgtctctctctctcacacacacactttcttaactattcttttctctcaactaactgtctttttaagttttcttttaggaaactcagataacaaacacatccaagcaatttgctttaaactattcagaatcgcatttgcttcccctgcagtgtaagagatgagttaataactgatctagagaccaatcgagatgcagcactttggtgcctattctacaacatgttctaatgtcttagtgaccaatgacctcaggtcagacctcacccatgcctaattggaaaagccccacaaacctagaaggattttatattttctttttttttttctttccattttttattaggtatttagctcatttacatttccaatgctatccaaaaagtcccccatacccacccacccccactcccctacccgcccactccccctttttggccctggcgttcccctgttctggggcatataaagtttgtgtgtccaatgggcctctctttccagtgatggccgactaggccatcttttgatacatatgcagctagagtcaggattttatattttcaaatgattaaaagaaaggcagaggcaggtggatctctgtgagttcaaggccagcgtagtctatagagcaagttctaggacagccaggactacaaactgaaacccagtctcaaacaaacaaaatcttcatatgaaaattacataaaattcatattacagtatctgaacataaagttttattgggacatagctgtgcttctttctatgggtcatctgtggtgcctttgtggtaaactggtacttgcattatgatacagattggcatggcccacaaggacaaaaatttcctaattgcccctttacagaaatcctcagctgatccctggcctagtactatgatgatctctctgcctctctttcctggagttatgctctccctaccaattcttaccacctaccagttgactttatgcatagataaaatcagaactatgtccgaactctgaaatgaatcaaaaagcatattttatattcatatccctgtaatgtagaagtacagtgaataatatgaaggatattctttgtaaatttttgggggcaaggtcttattatgtcacccaaactgtcttaggtctcactgtgtagtctaaactggaccctaacttagggcagtcttggcctctcaaatactgaagttatagaggtgaactaccaccacccatgaaatgtaaagctaacagagtatagcacacatatgtttcatggggatataggtcaacccacagcatacagtagaatataggattaagggtcattccactacactacattttaaaataagaattatcttatgaatatgagtacactgtagttgtcttcagactcaccagaagagggcattggctctctttacagatggttgtgagccaccatgtagttgctgggaattgaactcaggacctctggaagagcagtcagtgctcttaaccactgagccatctctccagccctacactatacacacacacacacacacacacacacacacacacacacacacacacacacgtacgtacgtacgtatgtgtgtgtgtgtatgtatatatgtgtgtgtgtgtgtgtgtatatatgtgtgtgtgtgtgtgtgtgtgtgtgtgtgtgtgtgtagtacagtgcacatcagttaaagtgcacatagtgtattcatcatcccacctctcttcacagttcttcccattgtcttctcctttcctgtgttcctagacaaccttaatccaaggtggagctacattaccttgcagtctttagaattttatattatttttttaatttgtttgtgtatatgagtgttttgcctacatgtatatctgtgtactacatgtatgtctggtgccctgggagggcagaaacagatacaggctctcatgcgctggagtgttgcagacagttgttgttggcgtgtgggcgtgcaatccagctcttctgcaagagcagcaagtgttctctcttctttttttttttttaaagatttatttaatatgtaagtacactgtagctgttttcaaacacaccagaagagggtgtcagatctcattacaggtggttgtgagccaccatgtggttgctgggatttgaactcaggacctctggaatagcagtcagtgctcttaaccgctgagccatctctccagcccacagcaaatgttcttaaccatccaaccatctcaccccatatctttgttttgttttgttctgatttgatttcttaattaaactcagaataattatttatctttgtgcatttaattattgtagtttatactgtaaacaggcttacttgttgagtttgacatagtatttatttccagtctttctctatttgaaaaaaagctgctaatgaaatttatgtacataccgctgtgtggatatgtgcttgtttcactttggatatctaaattgtttagctaccagtctatttttttcagaacttgctcattttccaaacagattcacattagtggtgtatatagtttctgatgttaccacatctccaccaatgtttgtaatgatcataaaattattttgtcagcttttcagcttttccattctgttgttaaccccaccaagatttcaaatgctttttgtttttttggtggtttttttttgtttgtttgtttgttttttgtttttttgacatctaatgaaattgggtgaagtagaaacttaagggttctttggaaattcagttgtgttggatggtcttttgttagggcacgaacatgaaaggagtgttttcctgaagtggacacaggggaacaactcaggcagactcgtgaaggaacattttactaaagcagacacaagacagaggatgttttgtaaagtacacaggtgaaagaacatgtgatatgggattttttgttaacaagattggttacctagaaattctgagtatacttgattgtatcttaaaagttaaaacttttaactctttttttgagaagctggagagatgcctctgggtaaaagcacttgctactcttccagaggtcctgagtccagcaaccacacagtggctcacagccatttataatggggtctgatgccctcttctggcgtgcatgtgtacttgcagatagagcactcgtatgcataaaataagtaaatcttaaagaaaaaagaaaaaaaattaccattgaacaaaaagtgaaagctgaagtcttttatttttcctgtgggtgattaatagtaaacaaaacattttctacttgttcttcatagacatttgccagaaaaaaaaatctaggtttaaaaaaaaaaaaaaactactataggtttcaagtgttgtaatttactctgtaaaatgcacctttggttcggtctgcatttactaaagcatctaccttcatggaattgagggatatgctcttaacacattataacaaaaaaagacacagataaataattaaaaattattgtgccattgttggcatgaatagtaagggtatagacagagttattagttgctgattagcagatacctggtagttccaaagtgtggagattattttttggttcagataatcgtactttaggccttgtaggccatttcatctgtcctaactcctcagttctacaagtggggaaatgcaactgggcagcaatgttggaggatgggtgtaaccctgtgtgttctagcaaacctttcttcatccagtgagtaatggggatgagctggaggaaagcctcctggtttttccctgcctccttgcttagaaagtataaagtaaatgtagatacaactctaaaaccaaatataactaatgactaatggttcatgctgcctaaactcaaatgaaaatactaagacctgttaaagtctctttatatgagcaagtgtataagtctgtgcttttgtatgtcgtgcctggagatgatctgtgcctacagagctggtggcgtttccgtttctgaataagagagcaggggcattgcaacaggagcagtaacaaaactttttctgaatatattcgtgctcagagtaatcaagtatgccaggagactcccaccaccaccaccaccactccgttccaggaagcagctttgcctgtcacatgggagtaaatatgcaatcaccacagcagtgtacaattggagtcttacccttttgaattactttttaaatttctttcttcccccttttttcctaatatcttatctctaagtctaccttttaagaaattttaaatttagagtttaaagggtttttttaggtttaaattaaaatatgaagaaatggtttcattgtggcatgtgtgtgtgtgtccattgtactgtattctaatgtcttctccctctctgctcttccacttattacactggttggttccttcctttccacagatagtccccacttctgaatctgttactctaacctaagatctcttctttccctcttatgaacctcttagtagtttgatgacacatgcatgagtggtgtgtgtgtgtgtgtgtgtgtataaataaatctgggctgtcccacatgtgagagaaaaacatagggtacatatctttctggattgctttattttaacagaatgatttcctatatttcagagaagatttatagataggttatctctgaaaaaaaatcttgtggtcatttgctctaatatactagattagtattggccatccttaaaaggggtaaaaaattgtgtacttcttcgttttggctttttgctgtttgtttgtttatatgtatggttttatttcttaatttttgggggtttgtttgtttgtttctggagacatgatcttactatgtagccctgactggtcttgaacttattctttaggtttgcctcagattcctcttcttgtctcagctgcccaccttagtgctaggattacagttatagaccaccacacccagcttatctacttgctttgtagtgctgggggccaagtccagagcctcctttgctactgagtagcagctgcagccataaatcactgatgtgtggtacagccagcatagatacctgttattattgatgggacagcttttcactcccatgtcattttactagtttatttgaaccattctcagtgagcggttcatcttttggatggttgcaagatcctcacctctttgaaaatgtgtcttctgtcctggttggttttattgtcaccctgatacaagctaaactattctagggagtctcagttgagaaaattctccatcaggttgtctataggcaggtgtgtgtgtagggggacattttcttgattcgtgattgatatggaaggtcccagctcatggtggatagcactacccaggacaggcagtcctgagtgtataagaaagcaaactgagcaagtcctgaggagtaagccagtaagcagcatgcctccatggcctctgcctcagctcctgcttcctcgttcctacctttagattcctgcccacgtttccctcagtggtagagtatgacctgagagttatgagcaggtaaagcccctcctccccaagttgcttttggtcttggtattttatcatagcaatagaactcctaattagtacatctgtgtctgttttcctataggagtcattggacattgtgccaagttagtttttattaaatcttgctttcttatatttgaattgtgaaagagattatttttactaatgcttgattcaaagttcaagtaaaaggtcctgttaggcagcagactaagtgcatttgctgttttgaactaaaatcactgatagcagttctgtataaaggcttgagtttaatttcaagatttgtttggggttttgtttgttttttgttttgtttttgagccgatttttttttttttttttttggtttttcgagacagagtttctctgtatagccctggctatcctggcactcactttgtagaccaggctggcctcgaactcagaaatctgcctgcttctgcctcccaagtactgggattaaaggcatgcgccaccactgcccggcttgagacgaattcttgcacttgttatttcactatatcttacctagaactatgtagatgaagttggccttggacctaccatgatcctctggctctttctgcctcctgagtagtggagttacagatgtgagcttccatgctcagcttctttttgcagtctttaagtaattaaatgttaagtgtgcacacaaatgtaacccacatggtgcctgtctatgttctaactcagttacaaaataactgaaacaattgtaatccacctgagctccatagtattctttccccagccatttgctagattctctcttgcacaccattctaataggtttatggttgagatgagaactgggggaactggatgcgagctgtcaccactgctatggcagcagaggaccaggtgctgtgaatagaaggaagaagcaatgtcctcaaggacttaaccagaatgggcaggagaaagcatgctaaacagagttcttaggacacttgagtcactctcctgtcttctgctaaattatatataagagcaaaaagaaagtctggtgacaaggcttgattctgctgttacgactcaggtctacctattgttggatttaatttttatgactgggagaggatagtggggagggggaaaagagaatgaggtgtgggactggagagatggctcagcgggtaagagcactcactgctcttccgaagctcctgagttcccagcaagcacatggtggctcacagccacccgtaatgggttctgacgccctcttctggtgtgtctgaagtcagctacagtgtatttatgtctaatgataaagagtgcgcagggctgaccagagcgagcataggtcctaaaattcaattcccaacaaccacatgaaggctcacaaccatctgtacagctacagtgtgctcgcatacattaagtaaataaataaataaataaatagattgatagataaataaatcttttttaaaaagtgagaatgaggtgtgatatgtcatttcataagagcttatttcatagcagaaatatctatagaccattgcattgccttttgcatagtgtgcttggggctgattttcccatgcacagtgtcctgattacatcttggcagtggtgcttcctcatctgctgaagcaaagagaactcagcgaagacctcaagttcctcagctgtcctcctcttatgtgtccttctgagaactctctttgactgtttcactgaactgtactttactgagctacccactcctcccacctcttcctagttttcagcagcaaatatggctgttttaagtttctaagtgagacaagttcctcatgttgggtaaggatcctaaaagtctgagaactcttcaactataggatcctgaccacaggcttcctctgttggttttagttcaacagagaaaagaaagtacctgctttttaaagtgtggtatctaaaaagaataacttctttagttctatttgtatgtatgtgcatgtccctgtgtgaatatatagcctgtgagggcaatgcccatagaagcaagaagagaggattggatgccctggatctggagcttgatgtgggtgctggagactgagctctggtcctctactcatctagaaaggaggactcttgtcaggttagctatctttatagaaaactgtctctctccaggccagatcttagtagatgctgttggtgtagcaatagaataggatgagctgccatgagatagcaagtgttccaagggcttaggtaagagtttcctaggggaagcttacaacacataaccatctcctacttatatcttgcagaattctccaaaggtctggttatctgtgactgctctctgcaggcccagagaaccaaagcctgaggcttctttccagtgccctctactgacaacccgagtgctgcttttaaaagctaagatgtagggagccagggttcagcaatatttcacttcccaacaggatgtgagttgccaggattatagaatacctctgggaaagagggaaagaattgaataaagaccctcataaccatgtgacctggtttcaggggacagaacaaagagtatttgaatcttaacgagactgcagcccaggctgcaaactggctgtcagtgtaattgcaccatctggtcaacatcagactcctagggtcttgttatgtccttcccacgccatcttttatcacatttatggtaaagaatctgagttatggcagctaaaatacttattgcctttctctgtgcgtcacaaaatgtaaagctcatgaagggaaggtatcttgtgactttgcagaaaggtttttcagtttctctgatgctggtagatatatattctgtatcaagaaagtagatgaaaatgagagatgcagggatatgaacaggaaagacctttgatttgaatgaagtgttttacttctgtcctctatactgatattttcatggttctctttttttcttatcagtgaagtggggctcaaattaagtttagtgaagaataaaaactcccactaacttcctgtcacagtgtagctggcggttgtgttcagtgagaaagctctgctgagtcagaactaaaataagaatgtatcttagagcctgacaggcggctgctgctgctgctgctgcttggcaccatggccatataaagagctcctgcctgtgccaaatggtttccctggtaacttgggcatctcttaggtcaacacagctaaaaataccgttattctatatttggagctttctcaaatgtggctttgtatctttctaaaaagatgtttggaagtaggtgataatatgttaattcatcatgataggaataaaagatgttatgagcagtaaaggaatcactagaggactagtttctaggaaaaatatttttaaaatcacagcaaagcctcctaacctctgagggaaatataaaaaattgtttaagttgatccaacactccaaatttgtgtggggcttcaggagttcactgcagtgattagttacgggagctgtctctaaagcacaatcatgctaaagacctcttgagctgtatgggtgtcagcaggggtggtacctgtcaacctgtcagtgttggccctctgcctcttagcagaatgcttgatggaatatggagagggtgctcagtcatccacctttagacagagacaagagatccagctttgaggcacttgcatacagaacacagtgttcggtttctctaaagtcaggctaattgaatgggatatggaggttctagctgaggagaataatagtgattctttgacagttatacatttcctctagaggatataaggcattgttgggtgacagggaagtgcaaatccaacttacaaaatgaaatgtgcaggctactcatcctgcccagcctaccagttgttcacgacatttctcagtgttctgccattaatggttatgattttctctacacatttggcagctcatctccttttcacagtaggttaccagtatggtaaggatgtgtcatcatagagaaaaggcagctgtttggcattgtgtttttgtggaaaggtaggaaacgtaggtgctgttactttctctgtacacagttttcagaatgttactgtcagagagggacataaaggaagagcatgagcttgatttgtttctgtctctctcttccactctcccgacctagggcgtcttttacacaatcacatcttttgcagatagggttttgttatgtgaatcacttagaggtgcttcgtgagaaatagaccccaaagtaagctattgttacttgttaaactggatagggttgggtagctgcagtattgatgtgcattatttaagccagtttggggcatttctgatgttgtggagctggcacacatggttctgtcacaggtccttggcagccccttgctgcatcttgcctgatctgagtggcctctctattctgcagacaccagagaggagttcttgccgcacctgatagtagcagatttgaattattgattatgggacaaagtatctactagtgtacttcctgacaagtttccagcctatggtcggatagcatcacactcacttcctttatgaatatctcctcaaatatcataaggtcagccacgtgctactatataactacgacatcaaagctacctcctttattttacatgttttatttcagtggtcaattcttaggaacagttatatgtaaatagccttataccaggcatcctggcatggggcattggtggtgcagggttgaaaactggtactttaatccacacatttcatattttcatgtttttaaatgattttttaaactttctctctgggttatagttaatatacaataaagttgtgggcagcattagcacacatctttagtcctaatacccaggcggatacagtcgaatcttagttggatgccagcctggtctgcagagtacattccaacagagagcaactcggtcctaacaaaacaagcaaacaaaatgatacagtaaagtcagagtgctcttatttccttttaataaccgtagtaaacatcgtggtaatactaatacagacgtaaatgtatgcatcgctattcagcttcagctcagttaagaaagcttgtgttaaccactttttcactcttctccatgtgatgaatttgtttgccttacacaattaagaagcaattttaaaaataaggcaaaaggcatattatctgaaaattcatccatttctgcttgagctttgcctacttccttattgtcttgaaagaaaacatattacattgtcctacaaactggaaacggggaagagctttccgtctccattctctcacttgcgttgttttcagtagtcccgggaaaatcagatgaaattttccacttaagccaagtagagaattacagggaaatagttctgccaagtagtaatgtaactaggccatgttaattgatttgaataccccatatggcacccagatcttttgtagcaattgaagaggcttcatcctagtggtagttgctgctaagttcttagtttcgtgatggatttagaataaataagcagtttctagctctcccattccacagttatcactcactgtggtgtggggatggttccagagcacttctctacacctccacctctgctgtaccatcatgcccatgggatagcaaagcctgtggttgcttgggccccttagaaaatggcctggtccttgcataaaatttaccaaactttcattttaaatcatctctatactatgctacctaatacaatgcagaagaatgaatggataggtggatgaataatgacatgttaaagctaaacttttactataaatttgatttcttttgcatttgtgctgatgtgtttgcatgttcatggtgggatggtaaacatgtgtgcacagatatgtggaagccaatggccaacctcagaagttgtcatccttggttttgttttctttcatatgtgtttgcaagtatgtatgcacatgggtatagaagtgttcatgtctgaacatgcatgtggaaacacaggttaatacgcggcatcatcctcgattattctttgagatagggtctctcatttaagccagagcttgttgatctcctggactcaatggccagcttgccacgcacccctccttctgtccctccccaatcctcccccacccgtgtgtgtgtgtgtgtgtgtgtgtgtgtgtgtgtgtgtgtgtgtgttgagacagtgtctcatagccctggctgtcctggaatttgctacatgtacaccaagttggctttgaacttgcagagatccgcctgcctgtgtgctaagattaaaggtatacaccaccatgcctgatctgcttataaatcttgtaggagaggggcaaggcctcatgagcctctttcacttccatggcagaaagttaatgggctgattcttttctggatcttttttaaataatcctggctgctgacagtgcaagagagcactagtcaggtcatgctcagagaacagtattccatacacagactttcactgcagtgcagagctcaccaattagaccacttctggttggtgaccagaggcatgacatgaggttgagtccagcctaggttttgtagcgagatcctgtcttaatttcccagattcaatcccagcccggcctccactcccaaagctgcttttggtacctctgcttatgaatatgttcacattttaagtatctaactcctaggaacagctgtgatggtttgtatgacatgtctaaacaggctatttggatttttgatctttggccatttggggtacagtcatgaagttagcagactggtgaaatcagaagctctgcagctgtcttcacgttgtactggagtgctctagtgtgtagtttgttctcaacaaaacattaaacatacccactgtcttagctaggtttgtatttattgttgcaattaagtactatgaccaaaagcaatttggggaggaaagggtttattacagcttgaatgctagggcaggaagttaaggcaggaaccttggggcaggaagcgaagcagaagccatatgcacatggaacatcagaagacagcttttctctttccattgtctagggtctgaaaagaaaattcaggttatcaggcttggatcaagctcccaatgagccatctcaccatcccatcaatagcttttatatatatcaataacaaaacttctgggaaaaggaatcaagaaagcaatctgatttacagtagaggaaataaaataggaaaggattgagagagaaagaactaggaaaaaaaattagccaccacttagcccatggaaaaatataatctctttgatgaaaatcatcaaacacaagggggctggagagatggctcagtgttagagagtactggcaccttctccaaaggtcctgagttcaattcccagcaaccacatggtgcctcacaaccatctgtaatgggatccgatgccctcttctggtgtgtccgaattcagtgacaatgtactcacatacataaaataaatatttaaaaattaaagaaagaaaatcatcaaacactgatgaaagaaactaagaggtccccaaattagaaagatatgtagatgatcatgaattgttaaaatgtctgtagaaccccttatgaccaacaagttcagctcctgtcagtataccattggggcttagagacatgactctgggagccctggctgctcttccagacaacccaggcgcagtctagtgctcacatggtgactcacaactgtaacttcatcccagaggatctgacaccttcttctatccttcaatggtacatagacatatatgcatagaaaacacacacacacacacatattataaataaaaacttttaaaaataccagctgggcagtggtgaggatgtctttaatccctgaacttggaagacagaggcagatggatctcggagttcaaggccagtctggtctacaaagtgagttctaggacatccaggcctgttacacagaaaaaccttgtctcgaaaaaatatatataccagcaatattatctgcagatgtagaaaaagtactccacaaaaatttgaattgattcacatagactgtcaaatagctaatgcagtcctgagcagagaggaagaagtttggaagcattagcagcctaagtaatttggtactggcataaaaccagactaatagagcagactggagaacacagataaatcatcaacattcgctgattttcagcgaagatggtgaggatatactatgtatatatacatacaatgcatacaaatttatcagagaaattactgctcaaatgatataagattgaagctcaagaaatggctcagcagttaagagctttttctgtccttccagaggcccggagttctgttctcagttggatccatgtccaacagctccagggggtctgacgccctctcctggcatctgttggtactgtgttcacatgcacaaagctcacatgtattagactttttaaaaaatattaaatgcattaatagactgtttaaaaaaagatgaaaagttaccaagtagtcattaaaatacggaaccatctttattatctttatttcagtttgaattttaaaaacttctatcttgccatattctttaatctcctgcatttttatttctacccactttttgattgatagatagatagatagatagatagatacaacaaacttttatttccaagcctaaaagttactatagtattgaggtctctgtacggtcaaatttaattactaaaaatactatgaggaactgactggaagcctactgagagtccttccaaagctgcagattcccccccgttgggttttctctacctgcagtttgtccttctttagtcatttcacttttgtggtgttttcctgccagttttgtctcctcttttgctccttctctctggcgtccatcatcttggccaatttccaagacaggtcagcactagctaggaacagttctgcccacttttattagggagcatctgcaagtgccagaattgttccttatgaattaggtctctctctggctaccatttgctttccccactgagatgtaagaaatgtcgtcctccctcctccttccctaggaaaaggtcctgattgatatatgctgcaaatacagtttcaccctccacagataacaccacacattcttaccacttcattttgatactttgttacctgtcttcagctgcatggagcatgaggtttaagattgtgggtaaaaaattgtacttagctaacctctattatccaaattttatcgtttttttgtttttgtctttttgcagtctaaagaaatgtagtctctctctctctctctcatttttcttaagtagtcaggtacaaattacaaagagatcagacaaatcgattacatagagaattgtagaggattttgtggtattatgtccatgtatcagtaacctttgttgaactccatgattctgttattcttccagcatgtaagcttataagggctgattatgtcagttattgtcaagcatttgtggaattaaagactacttttgctgcatttattataagaacagaagagcttttaccaaaaataaactgggcttgtaagttacataagcatttaagccaggtagcatacactttagtatagcagaatggatcttattttgtagattccagtatcaaggaatattatattgtacacacaaggagaaagagagtaaaatattgtttagccatcaaaacagaaagaatttgtgtcatttcaacactagaaatcattgattaaataaaataaactaagtttagaaagtcctgcatgctttcacttacatttgtaagctaacagtttatctcagagtggttaccagtggctaagcaaggagaaggcttgggtaatgaaaagaggtggtaattggaaaccaagatacagaggaaccagaggaacaacttatgttacatatggtatacttcagttggataactttggtaagcaacaattaattgactcgttctaaatagctagtagggaaatttttgaattttctacactttccccaaagaaatgatgtataattaagatgattaaggtgttaagctagtttaccctggtctgatctttccaaagtgtgtgtgtgtgtgtgtgtgtgtgtgtgtgtgtgtaaatgtcacactgtaccacattgatgtgaacagttactgggtcaataaaactacatgttttagcacatgcctataatcccagcatttctgggctgaggcaaaagaaacaccagtgtaaggcaagcctgggttacaatatgagaccttgtccccccaaccccccccaaaaaaaatttaacaatgctctgtttaaatgtggcatagctgtgcatgcctttaattgcagcttttaggatataaaacagtaagattgggagccaaggccagcctccacttcatagtgaatttgagatgcctatgaaacactgtctccaaaaacaaaatgaaatagaccttaaagatacaggtcttagtacttagtatcaggcatcacccttagcctagtttcagctgccaatagagaaaacaataaaagatcttctcaccactttctgtaaatatgacaggtgatccagaacaatcactatctggcctgcctagaagccagtcctctcacatcaactttttgcaaagacatgttttgttacatgggctactaatttggagacccagagccatgtgttagctctacctctctgcaggctggtagaagaatttacaggagaggaatgagaggttgtttattggctggactgtcagaagggggccttttaggttcttggtgcagccatttgtggccatcacatttctttataggtcataagtttacacaagagatacattctgagggaggttttgaacttgtgatatctgatataaggtcactgagtggaggatctttgttgtttgtttttcaatggaagacacccttactggtggtaggcaagtaatctaccactgagctacatccgaagacctttcaaataaaagttggtctttggttttttgtttgtttggttttttgggggtttttttttttagatagaattttttttttaatcattttattagtttacattcaacccccctattccatccccttctcccccctcccctttgcctctaagagggtgcttctccacccactcacccacttctgcctcaccgctctagcatcccctatgctgaggcatcaagcctccaggaccaagggcctcccctcccactgatgccacataaggccatcctctgctacatatgtatctggagccatggttccctccatgttcactctttggttggtggtttagcccctgggagctctggatggtccagatagttgatattgttcttcctatagggttgcaattcccttcagctccttcagtccttcccctagctcttccattggggtccccgggctcagtcacatggttagctgtgagtatctgtatctgtattggtcaggtgctggtagaaactctcaggtaatagccataccaggctcctctcagcaagcattcttgatatcagtaatagtggtggagtttggtgtctgcagatgggatggatccctaggtggggcagtctccggatggcctttccttcaacccctgttccattttttgtccctgtctttcctttggaaagaaatatttctgggttaacaattttgagatgggtgggtggccccatccctcaactgggggccgtgcctatctactggagttggtctccacaggttctatcttccctttgtttcttattttggctaaagtcatccctctagggtcctgggagtctctcatttctctggcagctgggactttctagtggctacccacagttccccaccccccactgctacatatttctatttgatttcctgaccctctgtacttctcccctgccccttcaaatacctggccctgccctacttttcctctcccctcccaggtccctctctctaccttctgtgattattttgttcccccttctatataggattgaagtaaccacactttggtcttccttcttcttaagctccatatggtttgtgggttgtatcgtgggtattctgagcatttgagctaacatggtatgtactcactgataagtggatattagacagaatcttactgtataattcaggctggcctttatcgttgtggagcccgtggtgggtttaaattctaaattcgtctgcctcagcctctcaagtgcttgtattattggcatgcacccccactcctagcagctctttcaaagttaaagtatgattggaatatagctcaacagattcactctcagcatctcttaagtgaaggataaatctacatttacacagaagcctctaaacaactttcattggcaatagcctaaaactatgaagtacttaaatcttcagtgagtgaatggtttaactacatatatattaatactgctgaatattatgcagcaacataagatcaaactacatatacgtatctagcaacctggacagatctcagtgactgtgactaaacaaaaccaaccttcggccagcacatatagtagggttccacaaatgacacgttatacaggtgaaaaacagattagttaaggagtacagtaaggagatttctatgggcagagatcatgtcctgcttgattggtggccacagtagctacacactcagtggcagtagaacagctatgccactgccaggctcccaacttcgctgctctatttccccttcttcagagaggaaactgaaggagtggcttatgctccgtcagcacgaggctgaagaattgtctggttctgtccttcctgttttactttgtcctaatgaaaagaaaccaaaaccaagagagtatagatgaatggaaagggtgatatttgcacagggaagctgtctctagggctttccctcttctggcatccaccagtctggggtccaagcaggtccagggctgcagtcttggaattcctcatcattttgatatctctggattcaaagtagggaggtgtgatctcagttcctgcttctggtcccattttgtacctgccatatactggttttgagttcctgttttatttcccagtgattctgttcagccattttctctcatagaagttacagcatagccctgtcacttattattcagcctctttgtggccttggttttcttacttgtgaatagcacctgtttcatagaggatatggtgatatgataggagacactattcacggttactcaggtctcaactgttgcttgtctctcaaagggcatatggctcttctgttatcactatgacctgcagtgcttagcgccgtgcctgctcacagttctttgaggtgcttgctttgggtaggatggcttgttggactagagaatggaaccacagaagaaccctgcaccctgtgttgcctcatgcttctctgttgctattatcatcatgacaaacacaattacaagacagtagtagtttaagctaaatatagcaggaataccatgaagaatccgtgactctcctgttacaggattagctgggattaaattgaagaattacagttaaactctagtctggtttacactgctccattcattgaagcctttactatgctgttacttttatcaagaacaaagataataaatggctacatagagcttcccttcaggggctcacaggtcctttctgaagcttatcaagcttttcaaaaatttctgtgtatacccaaatggagactcactcagacacaaattgtcactaacacgtgaaatggttttgggagcttctagaagtcataatagatccagactgctgtgctgcagagctcttaacatgaaaagtcaggagtgaccctggcagctgggtgacgcatgtgggaacagtgggagtgaccctggctgggaaacaggaggcctggatattgtttctcttctctgtatcctgctcggcatcacaggactctgaactctcaagcttgtacaatggccttcccaggacgggcacgcccgtgcactatcccagagaatgaagaaatcccccaaacagcccttaacagcgtccttgaagctaatgggaatgaagacgagagggctgtgtcaaacctgcagcgcaggcacagtgacgtaaaggtctacaaggaattctgtgatttttatgcgaaattgtgagtctcttccctcctaaaatacaggctttcaagtctccagatcttcagttctgcatttcctagccatttaagccagctagtgtgttttaatttagcagggcttttccagggtgtacggagggctgggggtggttctcagattgccttgtcttataaacttccaccagaggacatactagatgtcaaggaaaatgccaccttcctgggaagaatagacagcgctcatctttctaataatggtacattttcactgtgttatccataagagaagttggcacttgtgttgtcaggatctatagcaggaaaaatatactctgagagttcccaaatatgaaactaaaaatttaatcgataaacactttgttggggatttatcccataatcaatatttgaggtggttaataaactctcaagatatttgataacagaattttatatattgtattttaagagtaggaaatttgtttcacatgtggagataaatgagatgtaaaaattggaaggtttgattgtggtttcctatgttagccgagttatggaggtgggtgtgtaacatcagtcctggttggcttttgtagacatgtattctctccgctcccatgttttctttgtcatcaacacttttagtgaaaaaacattttctggaaaattaagcaattaggtataaccaatctaatgacttatctctttaaaaatagcttcttcatacattgttaaatactgtcaagtataaaaaaaatgtgaacaatacaggagagtcaggcaagagagaagctgagtatgtaatcccaacacttgggaggtgtggagggtcaggaatttgagatcagccttggctacatgagacccagtctcaaagaaagaaaaaagagcaccaactgccagccaacaaggtgagagggaggggaagcctgagctcagttgggaggcacgcggtcgctgttttctgtccctgctttggtcactaaggggagttcatatatatgaatatgtgtgtaaaacattcatctacctacgcacttggccaagtctacttgagttttcaaacataattaagtctggaatgtagctgtagtgaatataaacaggtcagtgctaatagcatttttatcagcaccattttaaaaaagattgaaatccaatacttcttgtatgagaaatatgtatttattcgattaaaagtgacatattacatgctagtaatacagaggaaaaagtaaacttttgcacatttttcttgatgcagctccctccttccaatctgcttctgctcttggcacagagatatggctgagagggtacttcagaacttccagagattcagtcaccccagaccttgagaatcattgagttaagtgggagtaaagcaagacattccagaatgttcttcagcttttcggggaggtccattaagtttgctgaggagtgatatcattggagagaatttagaattataatggtgctgtgtcttttagtagcaccttctgctttccagaggggattatatttttttattatttcatcctcaaaacagcttctgataattcctgagcggatgtgggctagcgtctttctccactcagccactctttctgtaagaaaagagggtgcacagatcccttcagagttttattaaagacgttgctgttcgtctagatcctctctcctcacaataattctgaaaagacaaagtggaagtctctatacacagtgcttaggccaggttcgtcagaagtaaggctgcctcttttcacgttttaaaagtgttattttggggcgggggcggaggggagagtgtcatacactatgaaggtcaaagataacttgctggagtcagtttttcttctatgtgaattccagggatcaaacccacatcttcaggcttggcagcaagcactgtcaccagctttgctttctctcgggcccaatcttttcccttctcttcagtgacactcctatcttaattgagcttatgaattaaaacagacttttgattgatctggaatggtgaatgtggggattcagcatagtgttactgtggcaaggttacaacacagaattgtcttgaaacacttgaggaagaagacagatgtagagctgtcctccattggggtggacaaagaataagtcttgctatggaaatgctaaccttggaaagagctaagagcaaggccgctggttaaagtgtttgtgaagtgagaggctctccacgccatctgtcccttggcagtggtgccggcagactgatgagatatttgaaaggtcagaagctatgccaggagcagactgcttttgtagaggtagaactccaccatagaatcagcctctggaaacaaaaaaacaagccaaaacaaacaaacaaaaggcttggtcagtgactgttcagcatatggaaccttctccatttctagagctttcagaaacaaaatagctattcatgtgaaatcctcacctaagtctgcttcagctgctgcctggctcctgaagcgccagtggctagagaaaacaattattcgtgatcacatcctgtgttttgaggtagagtgggattgcttgtgagggaactgtcagagtcactcaatgctagttaatgcctgcttttattttcctggcctgtaaaacatgattgtgtccctaccatgaactgccaagagtttgccgaaaggctgtgatctgtgatggagatgattccttgtaagcagagagcctggattctacccctgtgtcattcattcatgagtagctagtgccatgatgttgagttaactgttcacctctgaacctgtttctctatctacaaagtgatttttttttttaaagatttatttattcattatatgtaaatacactgtagctgtcttcagacacaccagaagagggagtcatatcttgttatggatggttgtgagccaccatgtggttgctgggattcgaactctggaccttcagaagagcagtcgggtgctcttacccactgagccatctcaccagcccccaaagtgatttttattacataaaattctgtgatttagtgatacattttatactgtagtactaaatgtttgctttataaactgtctaatagaattgaggcatcttgtctaatttttagtggttttaagcagttgttttgaacaatatcgaatcaaaggtataatctaaatctaggttatgatatgatgtttagttacatgaagtttagattctgttctttaaagaaattgactttaagccgggcgtggtggcgcacgcctttaattccagcaatcaggaggcagaggcaggcagatttctgagttcgaggccagcctggtctacagagtgagttccaggacagccaaggctacacagagaaaccctgtctcgaaaaacaaacaaacaaacaaacaaaaacaaaaaacaaaaaaaagaaagaaaaagaaattgactttaagttgttatttcatggagggtagaggctcatgaggccccacctatagcagagtagctaactattagcagttggcagtgcctaggggaaggaggcagtttacttttgcagtgtagcccattgttggtgacccatgctccagtgattgatgccacgcattcctgcacatatgggcagcactaattagactcagtgtgtcatcatgaggagggaaggagtaatggacgtgaagttatagggtgacatggaatggagagtcttggaagtggggagcaggactacctgtgatctaaatatattgtattcatgccaaaaaacaattttaaaaacattatctcatggatatcttgtttgtgttttttgagacagggtttctctgtgtagccctggctgtcctggaactcactctgtagaccaggctggcctcgaactcagaaatccacctgcctctacctcccaagtgctgggattaaaggcatgtgccaccactgctggcctctttaatattttaatgaaagttacttatccagctgtaattctgagttctttaagggaaacatttatccattgatttatttatttgagatagtctcgctatggctatttggtccaggttgttctttaacttccgggttcaagcaaccttccttgcctctatctcctaaaaggctggaactagaggtgtacaccactgcaccagcgaagagaacttttggctttgatctgtgttctttgtatccaacactgcttacaagaatgctgaaaatgttaaaatcaaacagaaacagagcaagaggtccttatagaaactaaagtgccaaggttagtgagactgggtcatttttaattagagaacttgcgaaatctggttttatggataaaataggagtttttgtgtccagctagagtttgctcctcgttcttgatgctgtctgctctttcagttaacaggttaatagtctctgtcttgccctttgtgtgttttagcaacatggccaatgccttggccagtgccacgtgtgagcgctgcaagggaggctttgcgcctgctgagaagatcgtgaacagtaatggtgagctgtaccacgaacagtgcttcgtatgtgctcagtgcttccagcagttcccagaaggactcttttatgaggtgggtcaactcagctgtccttcactttcagattccttaccagagattgagtaagtgccaggtatttagtacctgggaggtcagtggtggaatgcatgtggaacctgtgggtcccaacctaaataggatacccaggcataactacctacattcatgcccgtcagtacatctcagttcagaagctacagtgtcttgtaactgcccatcagacctgagtacttcttctccaagtacagaatcctttctctagcctgcagcagaagcatctctgcccccaaatgcgcgctcctacatcgaatctgcccagcctcacccctgggccttactttatcaggatgtcactgcacatcttcctaaaggggaacccatgtcaccaacttcctgatttccaggccatattctgcagatttccatgcatgtatttcgtaaagaggatcttgttaggacttgagcactacaggaaccactctgtttagcccttctatgtgtcttaagctattttctgaacacttgtttttcttgatgtcatcgtgtgatctgtacttcaattgtattgaaactttcttatcacaggaaatgtattatggaggtggctaggaaagctcattcccacatcatgagtgaacatgagagtaatcactttggcaattcatttttgttagcatcccacttaacatatttgcaaatgtgtgcatttttatatgatacatgtgcatagaattctgataaagctaagaatgtctgttctttgatttcttttttaattattattttatgtatatgggtgttttccatgcatatatatctgtgtgtcatatgcatgcctagtgcccttaaaggccaaaagagatgatccattggaactggatttaaagcgggttgtgagctgccatattgaactaaggtcctctattcttaatggccaaaccatctctcccctttgaggtatttttccttttctcctaccagacttcgatttttctgtctctatgcctgaaaaaggaaaggtagtttatagcagtcattactaaactattagtaccactgaggcctttccctgctctgggcagattgaaattcccacgccagcctggaaaacaccatttgttcccccatagatgttaaaaaaaaaaaaaaaaaaaccttccatttgtgaattgtctgtattagtgcaatgcaaggaaatagcattgagcattgagtcatagaatgaaattttattcagtagtacgcatattgttccggactttctactacacctcaagaaaaattaaacaaaaactcttagtagtaggaagatactcttttttttttttttttttttttttttaattccttagagaatcttttttgtcagaaatccaactgtagaagagaagatggaaagaacttcccagggtatataggtgatggtggtgagccagatgctctgttgactctgaatggctgtcattggtaagaaaaacagaagttaggcccctagggattgtgatggcatgggagggaaggcagctgttggactgctatcattcagtttaacaaactcttagaatttgacaaaggaaaaaaaaaaaaaaaagaatttgacaaaggctctgaaatctcttaactcagccagataagactgttttgattttaagatctttatgaagaattagggaaaatataagttaaatataaggcttttattattcattcatgaaagtcaatacacagaggttagaaaagtacaggcggaggtagagagaaaggaatccatgagtcaaagctttatttgtcatcagcgtccaaacaagactcctgtgaagtttcattagtaggcttaaagcaagtaggcacaaatttcagatggcgtgctgtgacacctgtatctgtacaatccgtgctgggtgtgggagtcagcccagctactcaagcagtatctagctgaccagggaaccctggtcatctggattgatcatactatagaactggaaagcatagaactggagatagggtgactgatactttctctggtatgagaaatatagcttctgttcacagcggatacttatgaccggctcacagcacacacagaggttccagaaatatgggggatggcttagtcagtaaaacgcttgccatacaagcatgaggacctgagttcaaatctccagcacttacgttaaaaaccagaagtagtggcacatccccataataccatagttcaggaggtagagatgggaagacctacctgcctaggctctagatgaaatcagtctggtcaaggtaggttgagcgcctatctccaaaaataaggtggactacagtcacaaacagatgtacatgtgtaattgcacacatacaatgcgcacatgaacatgtatgtgtacacatcaaaaaacaaaaaagcagggagcaatgttactcatactgtctaagtctcctttaatccctacctttctttcctttgtggccctgagaggtgaaaacatccttgacaacacagcaggtagcaatttgtgatgtgacagggttagaacccatattgaccctagtatccattcaggtctcttcttaagattaaggaaatgttactggaaaaacaattaaggaaagacctgagaaactcagagggaaaacttagttctggtttgtcttctacctgatctgccctctggagtcctccagtccctcttcatgccttttctctgataccgtcccttgcctgctattttggcattaaatatcactgtctttcttagctaacaatgcttaccttccgtgcacctgcctctacatgtggtcctgtcagttgcaaaaccatttatgtttggtcagaggggaaagcatggaaacagcctgagcagagcagaataaaacatgactcacacttgtcctcctgttcactccttactctcttcactgctgggctataaatatctccctagtattattccaaaagatgttacaaatcccagcatcgggctattattgggctgttgccttctgggtcctaaggaagacagctattttagctacaatgtttactgtttaaggtccattttccagccaaagatttataaagccacagatggaaaatacgaactttacttttgattaagtgacatgttagagaaaaagctatccccatcaaagaataagatgtatgttcagctatgcccaacaatggaagaataagatgtttcagctatgcccagcaatggaaggttttccagaactagaagtccatttgatttgttttgtctggggtctctgactgtctgttttttgaggttctgtagtccacctggctgagggtgtcgttaaactcctgaccctccagcttcctggggctgagattacaggcagaaacttggtgtgtatgtgtcagtcttagtataatgagccatcaggacatatgggttggtgatataattctttcttgtttagctttcaaagagccctaggttcactttgctataataatacctttgctattattgcttttaacttttgtcaaagtatcctcttccccttatttccacagtccttactcttccttttcccttggaaccagttatgaagacttaaagataaccaaatatggtgacacagacctgtggttccatcatttgggtggccaaggctggagatttgcaagttcagtactatcttggtgtgcttgcttaataagacactgtctcaaatttaaggggggcgggagacaagttttgttgacttactttaaaacatgattcacttttctttgtggaacttcctaatatatttatattagattagttgactaggatattcatccctctaggcaaagagaagactggagccagattcttcactacccactcactagaacacatggctagagataggaacaaaagcatttctgtcgcatctgtacatctcttaagcatggtatagctggttatgattgcacaggcttataattccagcacctgggagaggcaaggaggagcaggaattcccaacacccactggtacctccaaggccatgggagctcatgctctcttttaccatgttgagcaccaggaatatatggtgagcagacatacaagtaggcgaatgctcataacagaaaaataaaacattttaaaagtaaaactttgtcttaaaagaaaagcagaaccaaaaagaatgcatagcagctactaggaatactaccgagatatgatccctactcactcagtgaccctgtctcctactagatgatgtgctttaaaacaggaacctaaaaagtttcaatttaggtagaaatctgtctccctctgaaaaataaggggctttgcagatttgttcaccaagaagaactgatttacagatgttgcttgcccaggaggttcattactaacgtaaccagccagttccatctgcttcagtccatgtctttcctgagtccgcagaactcagattcgtctcttacatggagcaccttacacttcgctgtgactgtttgttacaatactcatcttcccacttaactttgaatacttctgccacaaagactgtccacattgatctgctatctctaatatataaccataaccccagcacttgggaaatggagagaaaggatcaagaactcaagccactcttgactacataggaagtttgagactagcctgagctacatgagacttttctcaaaagaaaaaagaccccaccaaaaaggtgtgctgttttctttctttgcttacttgcttgcttaaaatagcaggtgggcctgggggtgtggttagcagtggagtgcagactcatcatgtagaaggccctggatccaatcccagcactgaaatgtaaactaaaaagatcatgagacatgtccaatacccaaggaaatacagctcccagctctttataatgaagaaattattatctccatttaagagaaagtaagatttattttatgttattagtgctggattgccaaactaaaatccagtttccttcattctgatactattctgcattttactttaaaataacctattagactatagaaattaacactcgttttagtcttcatcaggaaatagtaaccttataacagtgtgagcatgttaaaaacatagcaggacagctggggtgtgttgcagtggtagaaggcttatctaatgtgttcaagtcccaggtggtgatgcttctccaagccttgattgagatggggctttcagtgccataggtgtcctaaggcagcatgcctgtgcttcccgtaccttgccagggagctagtcccctgttcaggagtattgtacattgccagcatacaagacttacaaggtcatacttatcccaaaaataactcagcatctgtttgtgagccatttactacacaagatgcattctaagttgttgttttttcatttgatagttacacgaatcctacaaactaggtatcactggttacatgtggtaaagcaagcccttgcctactgtatatagtgacagctgactcgatttttctctcaggactcgactccaaagctgcattctcttgcactacattgccctatctgtctcagaaactgaaatgatttagataagtttcataatataatacgtttttttctaaaatcttcactcacacattctgtagatcctacagaaagccagtgtcagatcccagggttcttttcatagttttcacagctctggttatgtagagcttgcatgaatgtgtgagtcacttatagctataggttttcaagttggataatgtagttatagttaaaagagtccgtgctgctggctggtggtggtgcacgcccttgaccccaaactaggcaggtggatgtctggaagtttgaagccagcctcgtctacagagtgagatcaggatggctagggctacatggagagagcttgtctcaaaaactaaatgaatagaaataaatcactgctagtttccatagattttagctgttttgtggagggaatgcccgtttaaacagaccccgacacctgcattagtggttcctaagtatagctttgtgataccttgcttatctccaccaaaagaggtcatttttctttcccttgaagtatttttagaagtgagctaaacccaccagttatagagggatccaattccacaaatctttccgactggcatagactggacccagaacaagggcatgactgtagccctctttgtgtgctgcagatccagccagcacacccagggccaaactctctgttcatgctgcagatttctctctccttgtttggttttcccagtgtgtgcctttctcccccatcccagtcgatattaacaggaaaggcctgttggtaatgaatgctgtaatggaacaatgattaacaaagagtttcctcactcatttcctctaatactgtatcctgattattcaggaaggctgggactgagaagtgaagactgaagagaggaaactccaaagccagcctctctgcttatctactgacccacttgtctcagagcaattcatgacagatgtataaatcaccaagtgactgtccagcatctgcatttctgaaatgagaccatcagctaagttcccgattattggctctaaagcaacagttattaagcctcctccctcacccctctgataagaatatttacagaactccaaaacctacacagaaagaagcagggctgttgccatggggctcatcttctcccacaccacactatctcctgggacataatgtttcttgcttattgtatttgtggtgataatcaatgagaagcatcgcctataggctccttcatctgaacatttggttccccgctggtggctgtttggaaaggttgtggaaccttgagggaggaagtatgtcactggaagtgggcttgaggatttattgactcaccccacttcctgctttctttctttgcttcctgtctgtgaataaaaatgtgatcagccagcttcctgctcctgccactagggcacgccttccctgctatgatgaactctgtccttctggaactgaagccaaaataaaccctttcttccttgagttgcttttagtcagagtttcatcacagcaacagaaagtaactaatacagtattccttgttttaaattggcttgggggtttaatgtaattatctaaactatagtgtttatggaaatttgattcttcaaaagttatagtttctggtttgttcttcattttatatcccaaacttttctgggttaatttatgggattccccagactctggttttttgagacagggtttctctgtgtagccctggctgtcctggaactcactctgtagatcaggctggcctcgaactcagaaatcctcctgcctctgcctcccaagtgctgggattaaaggtgtgcgccaccactgcccagctgatccccagactcttaattattttatgctcatagtctctacagtgtgtggaaaagaagcagcttgttatagcaaaatctcttggaataggaatggtagtcctaatactggatcttgtatcacagaggagcacaggatctagaatgcaggttattgcaatggaatcagttcctgaatacttggactctgtttcctgagtcagtctgtctgtctgtctgcctgcctgcttcccccccccaccccctttctaagaagagatccatgccaggcagtgaatctcttctgcctccatgggcaccaggcatgcaagtggtgcagacatatagacaagcaaaaaacccatacacaataatttttaaaaattattctagaatatgtacttcttgtaaatatttaagtttacagtgaaaaattttaaatactggcctaaaataatgcaagaaggagctttacatatatgcagattatcttagttgagagttctgtatctttcgttaaatttataaaagtaaatgagactggagagctgattcggtggttaagggctgcttctgcaaaggatccagactcaattctgaacacctagatagtaactaacaaccatctagagtccagttctagtgggtctgatgctcgcttctgcctctcatggacaccagacacacacagtgcacagacatgtgtgcagacaaaacacccatatatataaaataataataatccttaaagttaaaatatgtacatcaaaaataagcagtcagaggtgagaccagctgttcactgtgtcctcgccttgtatagtttctgtatgtgggggtggtgtgcctgtgtgcatgcacatatgtacccatacatgtgcaagttgaggttgttttctttgattgttctccacttttatattttgagatactgtttctcactgaacctgaagttagttcatcagttggctaggctttctgaccaatgaatcttgtccatctgtcactctgccaccttccccaggccagggttataagaacacatatctatgtatatggattgtgttttgttttgttttttaatgttggtttagagtacctcgtgtttgtacagtttattccctgtaccaacatagaggaatatggaaagtcccaaagttagctggggaggtgacgcacagctttaaccccagcactcataacgcaaaggcaaaggcaggcagatttctgtgagttcaaggacaacctagtctacagcacaagttccaggacagacagctagggctacaaagtgagactgtgtctccaaaaataaataaataaaaccccctttggtaaggactggaggagttgattggcagagaacacttttctaacattcacaaagatttgggttcaccacacacacatacacacacacacacacacacacacacactaaaacaacagcaaaagccactttgtcttttcatgaaataatctctttctatgcttgtttcacatatatatgaaagctgatggccttcatggtttttctttcagtttgaaggaaggaagtactgtgagcatgatttccaaatgctctttgctccctgctgccaccaatgtggtaagttttactgctgaatataagtgaaaataggtttcacactcatataagtcactatagtagttttgtctcttttgcgatgagaaaaccctctgactgaaagcagctgagggaggaagggcctatctcatgtgtgcttcaggaagcagtgcatcgctgagggaaggcagtgcagaagcctgaagcagaaactggagaaacagcttgctggcttgccataaggcttaagctcagctatggctgtatatttcagtccagggccacttgcccccgtacactgtgccacatagtaggctgggccctcctagatgactaaccatcaagacactcccctacagacatggccacaggccctctgttctcaggtgattgtaggatgcctcaagctgacaggtaaagctaacgtggacagtcattgaacagcagagagtacttgctattatatataaagctatatatatatatacttgctattatatatatataaagaagagccgcaatctggagagaattgacttttatggacatgtgggtaaagccagtagtgggccttctgcactgcttttccctctgcacatagcctttgccaacttgctggtggtctggccagggaaggtttcagttgactggataacggtgcttttgtacttggctcactcattgtagccacttcagtggtgactcaactagaacatttctagggcttggagaccctgcgttcaatgataaaaatgattggtgaaggaagtgggtgtctcaaaaatatagcaagaccaaaaaaacagaaaatactttgtagagactgaagttataacactcagtggtagaaatgtgcttagcattcataaggcccttggtttgatcctcatggaatgaaagggttgagggggtgtgtagtgagagtaaaggaaagagtgctataagattttagctctctgtgtcactgtgggcataaacaactaagaggtactggaagagctcaggacctgaaagagcttggaaaggaaagccatggtgtggtatggtatggcacggtacggtacaatatggacagttttaaaatgcaaaataaaaaatgaggacccaaatgagagaaagatcatctgtctgttctcttactccaacagacacagtgtaaaaggctttcttttaaactaggctggtaatgcaggcctgtgatcctaggtacctgggaggccatggctggaggatctcaagtttaagggctcacttgaggtcctatgtaaaaaagtaaaagggaaaattgcaagggctgaagaggtgatatcttaaagacaacttaggggtaaggcagtagcttctatgggaggaacactagagtcagtccctccataaacacttccctttcatttatggcaaataagacacctcacaacattctttgtgctttactttcctgtaggtgaattcatcattggcagggttatcaaagccatgaacaacagctggcatcctgagtgcttccgatgtgacctctgccaggaagtgctggcagacatagggtttgtcaagaatgctggcaggtaggagttttccatccttgttgactgtgggtggacaaagggactgttaactctcatgtgtttttttctatagagtctgaggtactgctctagggtgtgggaactcagaactaaccatgtgaaatgaccccagagcttggtcacagagtctgttactgccgcctcctgttctgctaggagagggaggcagtgatgaagtccatgtgcaccatgagttactagtggaaaagattttcctctactttgattctagcacaggagatagttttctaaaaaatggtttctttaatctttagtcagagacatgagaagtatatttttaatgattaaaaagaacttaagattttacatttccactttgaccctttatagacacctatgtcgcccatgtcataatcgtgaaaaagccagaggccttggaaaatacatctgccagaaatgccatgccatcattgatgaacagcctctgatcttcaagaacgacccttaccatccagaccacttcaactgtgccaactgcgggtattacagtatttccctgacattgtgcaaaacagtagaatcaacgtgaaggagcagagttgcctatttttctgttactgcagcaaaccaactgttttcttcaagcttttattttattttattttattctgcatgtgagcatgtgctcacatgtatgtactgtgcacctagggtcttgtgcagactaggcaaatggtctaccatggaattaaacctcaattcccccaacttttcgtgttagaagaaggtagtaagcaaagtaaaagaacaattagcagacagaacataagaagcaacagacagacagcggaacatcaccaaatcaggtgcctacaacatctggcagaaatgagtagagtagtccaattgagcatgtaattgagcatgtagaagtcacattatcaggttaggcatttacaacatacagcagaaatagctagagatactctgctgaagacagtcattgcttgagttatcttttatgtgtattggcgttttgctggtatacagtatatgcactacatatgagcctagtgaccatgaaagtcagatgagctcattaaataccctggaactagagttaaaaatgattgtcagccatcatgtgaatgctaacattgaaccaagggcttctataaggacagccagtattctaaaccactgagccatctctccagttctcatgttcttttttttttttttttttggtttttcgagacagggtttctctgtatagccttggctgtcctggaactcactttgtagaccaggctgtccttgaactcagaaatccgcctgcctctgcctcccaagtgctgggattaaaggcgtgtattatttatatgaatacactgtagttgtcttcagacacaccagaaaagggcattggatcccattacagatggttatgagccaccatgtggttgctgggaattgaactcaggacctctggaagagcagtcggtgctcttaaccgctgaaccatctctccagccctcatgttaagttcttgattgagaaatttatagacagagcagaatgttctctccctggatgagcttttagcttcccagggccaccacaggcctgcttataccagtggctgaacaatggtaacctttgttggaaatggttcccctctagctgttctcaaaggcttaattcttttagaagccttagttgtttgctgtccttcctcccttttgcagcagtagagggctagcctgccccagaacagggagccttaaaagacatttgaaataaacatgctggattctgggatttggagaaatggctcaatagttaagagcattagttgttcttgtaggcgacccaggcttagttcctagcaccatgtggcaaaagacaaccctctgtaacatcagttccagggcatctaatgctctcttctggcctttgcacgtatgcaccaggtacacagacatacatgcaaacaaagagcttatacacatacattttttaaagcccatgacaatttgccagtataatttatcttttcttactattttttgtcttaatagttataatattctttaatgaaaatcactcccattattttctcttatccttgctgttataggccactgagtttaactaagattgcttgcaagtatgtggctgtggagttatttcctgcatcttggacaccttacctaaatggctacaccctgaagataaatgactcctcctccaccagtagccattaacttccaatagcttttcagttcatgtgccctgaactcaatataatttatattttatattaataaacacctttgtatcataggctgtccacagattcataatcctctgtcctcagcctcccaagtgttggaattacagacatggatccagcactgggagttttaaggcagacagatggactgagatgtaatatgttattataagacaacaatgataagcatgattgaagtggcatgtgtctgacctttccttgtgtctcaccattaatgcaagatactagtaacaacctgaaacccagccaagtctcttaattcaagtttctcagatcacctttaatgaggggaaaatagaaattatcagggattcttataattatatcttttaaaatcttgttaaaaaaaaaaatcctgctacctctgttgggttcccatccggttgtacaatagtattcagtttaatgtcttttggtggacaggaaggagctaactgctgatgctcgggagctgaaaggggagctatactgtctgccatgccatgataagatgggggtccctatctgtggcgcctgcaggaggcccattgaagggcgagtagtgaatgccatgggcaagcaatggcatgtggaggtgagtacagcctgcccaaggggagccagtgctttcaatctccatgcctcaagtgtgctagcaagataacagtctaaggatgaaatgtggacatctaaaacaacagttgacttttgtcctagtttatcactatgactaaaacaaaacaaaaaaacctgaccaaaccaagtgtgggggcacactcctttaatcctggcacttgggaggcagaaccaggaggatctctataagttcagagctagcctggtctacatagtaagttctaggacagctagaactcactataaagagagactcaaaaacaaacaaacaacagctacctaaaagcaaattgggaaaaagaaagggtttattatggattataagttattgaccattgtgaagtgaagccaaggtaagaactaaagcagagatcaaggagacatgctgattattggcttgcttccaggctcattgtcagctcccttccttacacagcccaggctcacctgcccagggatagcaccacccacagtggactgggccctcccacatcaattagcaagcaagaaaatacccacagacatgcccacaggccagtcttagagaggcaactcctagaattatggactagtttgtgttaagtttacaaaaatgaacaagcacaactttatagtaaataaaaaaatctagaatgttgtaacatgacagcataatgctagatatatactttcctaaatctttcttgaggacaacattgtcacatctaacaacagatattctcagttataaatactgctgggatgcccatttcttcttttagatgtcttatttgatgggctggatttttgttttgttttttaaagattattttattgtatgtgtatgaatgtattatctgcgtgtgtgtgcctggagcctatgatggtgagacaggggcatcagttcccctggacctggacatgtggatagtcataatttccatgcggatgctggaaccaaacccagatccagaggagtgggtgcttctaactgctgggtacttagttattttctggtttgttttttggtttgggtttttttgttttgttttgttttgttttgtttggtgttttgttttgtttagagacagagtgctgggattaaagatgtgtgccatatcctgctgctgagcaattatcttaaagtaaccaattacagtttcctatacattagcactgagaccatgaaagcatctggtcttgctgggtgtgattgtgcacacctttaatcccagcagtcaggaggcagaggcaggcagattctgtaaattacagaccaacctggtctacacagcaagttttaggtcagcaagagctataagatctatatagtgaggcactatcaccaaaaaaggggtagatggaaatctggttattaatctattcaatttttttccagcattttgtttgtgccaaatgtgaaaaaccatttcttgggcatcgccattatgagaggaagggcttggcctactgtgaaactcactataatcaggtaatgactgtacttagtagatatatgatagatgcaaactgaaacatcaatgtttccactggagagaaagtgcttggaaaatgtgcattggtctacagagatgtactttaaatctttgagtctcaaaacactcactaactaatgtacaaacaatagctgtatatctacctttacccacaatctccctttgcttcctctgggtgcatttgattttactatataaaaatagagctttatattaatacatatatcttttatgtacagatatacgtgcacatttaaatgtccatagttttttgttgttgttttgagggtttttttattttatgtatatgagtgtttgcttgaatgtatgtccatgaaccccatgtgtacagtgcctgtggggcccagaacaaggcattggatcccctgagattgaaattaaaggtggttgtaagctgcttatgtggatgctgggaagtgaacttaggttctctgcaagagcagccagtgctcttaaccactgagccacctctacaacccatgcatagttttttggttgttgtttgtttgtttgctgggtttttgttttgttttgggtttggttttttgcagggcaagttttttgttgtttggtttagtttggttttatgggtggtgggtgagtagatggttggttggttggttggttggttggttggttggttttgatttttcaagatagggtttttcagactagtcctgtctgggaactagctctgcagaccatgttggcctcgatctcagactgcctgtgcctcccaagtgctggaattaaaggcatgtgccactcctgcccatcttatgcatagggtttttttgtttgtttgtttggttggttggttcgttttggcttttttgtaggggttttttttgtttgtttgtttgtttgtttgttttgttttttgtttgtttggttgtttgggtttttttgtggtttttccagacagggtttctctgtatagtcctggctgtcctggaactcactttgtagatcagaccgacctcgaactcagaaatccacctgcctctgcctcccgagtgctgggattaaaggcatgcgccaccacgcccggctgcataggattttttttttaatttttttagttgagaatttcatataatatgttttgatcatattcaatcctatcttctctaagtcttcccagatttaccctaccttcctatactttgccttcttataacccccagtttctttttttttttaataacccatcaacttcagtttgtgctcccatttacatctgtgtagggagctgtacactagagaatggccaacttaccaggagctacactcttaaagaaagttgacactccttcccacagccctcaactgcccatagttcctcagttaggactttaagccataagcatttgatgcagtcatgttcctttaccccaaatgtttcaatgtatatttccctagaatacagaactccttatatatcacagataccagcattgatataatgatttcacttattctgctttcatcatttagacatttgcttatctatttctctagagacaaggtttctctgtattactgcagcagcattcccagcgctgggatgcactaccacccagcccaataatgttcttatagtacttctttgtttcctgctctaagattagtgtcagtattgttatatttctttagcctcctcaaatatggaacatctccagtctccttagtatatccttttcctttcatctcttcagatggttctccactattattttgaggtcatgggctcttggctggaacactgaatagagtggtatgtcttcctcagcacttctcttctgtgttcattgctgttccactggtgcccacccaggcttggtgttgactatatctgcactgggagttactgcccaccccatcccccaacccgtgaacagtcactttctgacagcataaatgccctcctcatcactttctccttacatttagtagcatgcaagagtgctgcctgctctgggtggaaatgagagttacccagtttagtgccctccctgctcagttgccctcagcgttctgcttgaacaggcttcatcctccttcctgggcatagggttgttttgtatgttttgttattttggtgctcaaattgtcacaaggaaagatatgattaagtgaagaaaatggagtgtttgattgtaactaaccaattactgattttctttagaaagaataaattctcaaatttagttgccagctacttgtttttcagtggtaaacagaatggagatcatataaatatttactgttaaaaacttaattctgccaggcgtggtggtgcacgcctttaatcccagcactcaggaggcagaggcaggtagatttctgagttcgaagccagcctggtctataaaatgagttccaggacagccaagactatacagagaaaccctgtctcgaaaaaaccaaaaaaccaaaaaaaaaaaaaaaaaccaaaaaaacaaaaaacaattctaatgcagcttgagccttcaccatttgtttcttgtcttcattctcagctgtttggtgatgtttgtttccattgcaaccgtgtcatagaaggtgatggtatgtatctgcgggtggatgggccgactttgtcataaacacaatggtgggaagatggaaagaagctagctgctcctgtggtttgcagttcgggcactgtcagttgcttccctcttggcatgcttctccagaactgtacaacagctagatgggctaccaaggcagcacagctggtgcaagcaagctgtacagaggtgctaggacgtgctgtgtggcaaaccaggcaggacagattggctgtaacaaagaggaagcagctgtgtttgctcatggtcactaactagtcctgccagaaatttcctgacaaaattctaaacaatagtgtttgctgcatgctttctgattctcagcagacatcacctaatcaggaaatacaaggttagttcaagaccttcattagtgcactgcagtcaatttaactcctccctgcagtagacactgtcatgtaaaggacaaaggaagttaggtgcttattctcaacttcaaaagaaacacccctttaagtcaggtacattaaaatcgggaatttaaaatttgttatctaatgtatattgcttcaggggtcttggagccttgttagaaaagctcacctgagcaaggtgagacagatggttatctactgcccacggtgctacaaggaatagtgttttagtgtctcaaatttgtaagtaaagaaaaattaaaagttaaaaaagggcaaaagagccgggcatggtggcgaatgcctttaatcccagcactctggaggcagaggcaggcagatttctaagttggaggccagcctggtctacaaagtgagttccaggacagccaggactacacagagaaaccctgtctcgaggaaaaaaaaaaaaaaagggcaaaagaggtctagagagagagacctcaaaggataaatgcgtgtgtaatgaggaccagagttctatccttagcagcatggaaatactgctcacacagtgcaacctgcctgtaattcctgtgtttggaaggtagagaggggctccccagagcaagccgccaaccacactaactgttctggctagctctgagttcaactgggagacctttcctccattaataagatggagagtgatcaaagaaaacttcatatatacacacatgcatgtgcacccacacatgcacaaaggcatgcaaaaaaaatgaaaacatagaaatagtcttgcttaaatcataacctacctttccaataatgtgaaaaaagccaggcactcaagagacagacacaggagatctctatgactttagggccagcctggtccatatgttgttgagttccaggccagccaagagcttcataataagaccctgcctcaaaaaaaaaaaaaaaaaaaaaaaaaagcaggtgaaaagatagccataataataaaaagtaaattggttagaagcatacgaggagcatcgagcttttgggctgtgcttttgcaagggagaaaacaaaacttcttaccagacatgatggtgcacatatgtaattccgtaatcaaggaggataaagcaggaagaccagaagttcagtccaacctgggctacacagtaggactctgtctctagaggaaaggaacctctcaggaaagaaggcttgagcccccctctaggtgcatggggagcagccgtccgcgttcttcagggtggggaagtgaagccctcttcccgcagtgaaatgctcccgtgtgaccagatctctttccccacagtggtctctgctctcaacaaggcctggtgtgtgagctgctttgcctgctccacctgcaataccaaactcacactcaagtaagtactgggtccagtccattgtgattaccaaagctaaaagatttagatgccatttagaatgtaaaaggggaagtgattgattcctgtctctttttctcttgagtccttctgaaagtacatgttcttctttaattgttcctgttctgtcctttctttgttccactcaaagggataagtttgttgaaattgatctaaagccagtctgcaaatactgttatgagaaaatgccagaagagtttaagaggcgacttgccaaacgggagagagaagcaaaggataaggacaagcagagaaagagaaagccagtgtgtctgtaaacgttctgtccctcctactccattctcattgcttctctgtggttagtctcttaggatgcctttcttttctgtgtgtctttttgttgttctgtctttttttttaagcgtggttttttggttttttgtggccatagagattgaaatactcgtcctgtgtgaacttggttcttttgtcttttacaagtataaagcttaatgagacccatacttaccaagggctgtgtaatatgtacatatctgccgcagctcagcttttctgtcagtgtgaccaagagacaccttttctctacaacctttaaatagtagtgggaacagttttaaagtattttatggcaattaactgctgtggtctttggtttctttacctaaaattatttaactgaggaagtggagtgttgggtgttttagaaccacacgtgctcgcagcatgtcttctggctgagcaaagccacctagatggcatagcaacactgtcctctgcagtgctctgtatgctcactccctgccgcttgtgaaggcatttccttgagtttccagactcttactcttgttttgtatgggtatgcttcagtcttggacgttctgttggatcactgacatgattagttcatggttttctttatggtggtttgaacttgaaaagaaggtttgcttcattttcttatttccttttgttgaagaattaaaaggcaaatataaacttcaaacaagagaactagtctcactaaaggaggaatcatatattttaagcttttgccaccaaaaatagtttttgttctaagaaaacattgggaaaatatttagtttagttatagttacagagtacatgtagttccaaaaacaggcaagacccagaattccccagttaaatgactttgggcagcagagaaaccagagaccagcaacagttgatagatgtagagctactttaaaactgttccaactactatttaaagatcgcagagaaaaagtgtctaggccacactgtgacaaaaaagctggtctgagcctgcacatgagacaggcctgtacattcaagcctcttaccaccatttaaaccaaactgcccctcaagtattcatttaccaactggcaacatgtaacatttgaatcagcgttagtttctttgttaaaaaaaaaaaaatggaaagccaaactcagaaatgtcataatgtacaaaacatatttgtaaatacatgggtagggattattcttgttattaacattgttctttaaaatcacctcagtgctggatgtgatagtatacatacacctttgaccgagcatgcaggaagcagaggcaggcagatctctgtgagttcaaggccagactggcctaagtagagagttctaggtgagccagaactacatagaaagaagctgtctccaaaagaaaaagaaaaaagaaaaagaaacaaaatgacttcaaaacaattattgttatctgtaacagtgtatcactaggcttattctacaaatgctttctaagtataacttcacagcaaatgaacaggttataaataacgtacagagcttggaattcagcagtactaagctcctgcaattagcttttctgagtacattacaggtggagaccacctaagagctgttttctccagaactgtttataagtgaattgatactatgtgttcttctagctttaagaatggaatcatgttctctattgaactaccacttaaggaacacttaagggctgtcccattaccttagtgttcaagaatgataaccagctttttgtcccaatagctaaaaataacctactatgatttaagctctttttttaaaaaataatttcaggtaatttttttaaattaggagacaaaaggaaaatcatttctacagggaaagatgaaaccttatagttgcctaattaaaaatactaaatacatgataagatccttttaccttcaaaaattacatcactcacattataaaaaccatttctttgtggggtgtggtggttttaatcacagcactcaggaggcagaggcaagagtatctctgttagtttgaggcagcctggtctacaaagcgagttcagaacagccagatctatacagagaaacccttctccccccaaaacaaaacaaacaaacaaaaaaaccccccagtttttctttgctttaaataaatatattggaataagtttgttggtgacaagcatggtggttcacacttacaatccgagcactgggtagactgggaaaggaaaatccccatgagttctagccaactaggctctagagtgaaactgtctcaacaaactagggggtaaaaggcactgagaagaggaaagcgctgcctgatgctttaaagtttgattgactttatttgggatgaagagaaggcccagtgcttaaaacatcacatattctaaatgtaggggtacagaaccattgtataagcatattttcaactgataccagtcactcttgacatttatcataataagaattgacattagaattacagttctttactgacatgtacatagagattttatatactatgttacattgcgtcttcatttatgtcttttcatgaatttatgtcactttatcatgtttgtgtatatattgtgcatgtgtgtgctgaatatatttccactaatttcttttttatatataattccctttaggaataaatttgtggaatttgacatgaagccagtctgtaagaagtgctacgagaaatttcctttggagctgaagaaaagacttaagaaactatctgagaccttaggaaggaaataacttttggtgtcttttttctctctcttctaatcaatgttacttaacctgatctacccttgcttaaaactatgtcagagcattagaatggttttcttcatttcccttttctcatttaaaaacgaaagaaaatgtttatttctatgtaaaacacagatgaaatcaggactttcatttctttagccatattagtctgtaggcattaaaagtatataaccaaaaacaaaaacaaacaaaaaaaaaaggttaaagggtagttttaattaagccatccaaaatataaatttaacttcagagttaaacaccctgctctatggaccaaccaaagcacttgctgccagcctagtactaagttgaatccttaagagagtatctgagacagtgtccacatgggtcatgtggagcaagaacttactcccacaagttgttctctaacctccacagatggccatggtgcatatgcgccaacacacagttaataaacataatagacaaccactgttataaagagtcagctttcacgggactcacataagctttgcttccctgatcgcataagaaaatcatttcccattcatatactgggaactgtatgggaagataagtgcccaaacagttcctatgttgtcatgtgcttatccagttagcattgtaaaaggaacatgcatattactaagaagcaaaaacatttcaggatgactgatttctttttttattaaatcactaagcttagttttctattttgttctccttataaatttttccttcataaaattacttaacatacttgtaactactaatgcatcttttacatttttaagcaaaacaaaacaaaaatttgccagttatctggaaaatattgcatacattgtgatgttggggaaatgaagcattttaaaactatattacacataaaatgcatagtattcaaatgggacatgaaatgcactataatgcagcttcgaatgtatggctttcaaaagtgagcgtgagccaggtgtggtggcactaggcttcaatcccagctctctgcaggcagatctctgtgagtcctaggccacccagggctgcatattaaaaccttgtttcagaaagaatgactgtatctcgtattatctttgtgctaatatctatacttcatacataatctaacttgccttgccttagaaaactgcatcctatatcaggaattctagatatttcttataatatcaaaatgagtattttgattgagattcataaatttagaatcattcaccactgatacatactttaaaaattcttttctcaggaagccagtgaaagttaattcctgtcctcttattagaactatgctgatatactaaaacattttaatgaaggcttttttatttcaaatgtcataactgggttttgtttactataaagcagtaaagcagtataaatgatacctttagactgaaagagggtggtaagagtatcaactctaaggaaaaattggggagttctactttataaaactgtttatcctgaaatgtctgggccattctgtttgtatgaactcaatatgcaagagtatgaacattttttaaatttttctgctgctaacatgttaccttctttttcagttgccaagatatattttgcaaatactgctgaatataatgactcacattgtagtctcagcatttgggaggctgaggcagaaagattaccaggagttggagacaaatcctaggttacagtgtgagatactatcccccaaaacatccccacaaacaaaaacactagtgtattgttttgccgtaaagaatatctctggggcctaggaaaacgttcagtcagtaatggactcacaccagccttaggacctgagtttaaacttggagggagcagatccctggattttacgaggtagccaaactcagcctaactagtgagccccagatccaagggggaaatcctgtattccaaaaagcaaggtggatgcctcctgaggaagggccgcctagactgatccctagcctccacatccacacacacacatgcacacattcagaaatatggatgtgtacacacaaaaaggatatctcaggatgctgttactctgccattaaaagtttataatcatgaatttttaaaatacttgattatgcacattatggaatacatttctgtttccagataactaacttgtaaccaatcattttatttcctaatatccttttcatattaagagaattatatgtgactaaaaatatacatgatttgtgtttgttaagcattttaaatttgtctttgcttttgacaataagaaccaaaatttcttccgtgtgcctttgtcagctaagaatgactagcagtggctaccttagaagtatttatgaactattgtacatgcgtttaggcagatagaacttgtagtctagcgtcttgatgtaacttacatacctcactggaagtatggagcagaaaagcactcattcccgtgctttccccatccctttcgaggtgtgtggccttgcctgactgcctttgcttacgtgacatcgcttaagccagagtccccactgctgtctttgctcacttctcttcagacaggaatattccagtaagtttgatctcataattatgtggtaattcatctagagatggtgcttttcactgtggggtaaatcattagagcccttagtgtggaagatggaggtctaaatggggccaagacagagacttcatctacttcctattagttgtggggtttcactggctgctggcatttgtcagtgaacatctgtttgaatttctgagaacaatctgaaataattcattgtgcttatgaaatttctaagtgccctttttgtccttatcctaatataacatggaaaatggatacacaaaaaagattttttgtgtcatgttcaaagccttattataacactttgcctgaaataggtcattttgcctcatccatttgccaaattagccaatttcaagttagggaaactttgatgtaggctgacaatatccttgtattttattttagattgtaagcttaatggcaagaaattatatcaataattgtgctttttatgtagcaaccattgctgtgtacttttggtgcttaataaatattcataattattcatagtgtgttacatatcatttagtttgacctatctttgagaattcaaatattcatttagtataatatgttagaaacatcatatatgtaagtaaaagaaaatggcctgggtatggtatacaagccaagttttagcaccttttgtattaacttttcctggggcaacacagataaatgtctactcatcccagacagagaaccattctacccacatagtttgctgatgtggtgatttcactgaactaatttccagcagtttgggtgaaggctacttacaagaatttggataactttaggacagctgcatcatagaaaagctgcatccttgcagcactgggacaacctccaaagctgcgtaaatggagccccacccttcagttacctttcctcctacatattctagtgcctctcacaacacgcccctctggagcagaatcacttacatctgggctcagggcgtgcaggagggaacaagtagctcctatctcaaatgaggtctagtggcctcccccacacacctcctataaggaaactgctttgctcagggtcttgcaagtaatcagcagctatgattacaatggtactaactgtcttactccaaagacaacatcccacaatgtcacagaaattgttggatgtcagaataaacaacattttccagttctagggacccattccagacctggccttgtgtttggtagatataccaattcattgcacactgaccaaatgcttgacaagaagcaatttaaaggatgaagagtctcttgtgatgaggaagtgtgtgtcagcttgctcacatctgggctgatcaagaagtagagggaagccttggctgcaatcatttctgggctataacccttaagacccacccactggagcctcatggagatagtccatattccaaccctaacatccagtaagcgctctgccactgagtggaattccagctctcacttggatttccctctcttcacaggacagctgggactttcctttgtgtacccttgaaataaccacatgagtagattacagaccaccatgaatataaggccacttcagagtgctttactaaagcctgtgacagagcaggctcctgccataaagtacacttactctgaagtgaagcagggtagggtttacaaagtcaaggttcacaatcacatcacaccagagtggcacggggcaagaacaagagttttcatttcagtcgattaaaccctttccttgtatgttgtaaagcaatgggccttccaaagctgtcgctgtggctacataagaatcttctcagcaggatgggctcagccaatgggaagagctgagtgtagactgtggtctgagggaaaggcaacacattgacccattataaaaggggtagcattgggtcctcaggtacgaaggctgttcgtttgaaagagtttaataaccagttaattaaacagtctgtaaaagggacaagaggactgggtaggcccatgattccaatcaaactagccatggaattgagttttaggaaagtatatcataaggaccaacagttatttggagccatagtctggtatggctaaccaaagacatcagacaattttctattataaacatcatttttagaagcagtagaactagtaaaaacaaatttcatttgtcagagtccagtcctaggtaaggatcgtgtctgtactggctagttttgtgtcaacttgacacaggctagagttatcacagagaaagttgaggaaatgcctccatgagatccaactgtaaggcattttctcaattagtgatcaagggggaaagaccccttgtgggtgggactatctctgggctggtagtcttgggttctataagagagcaggctgagcaagccagggtaagcaagccagtaaagaacatccctccatggcctctgcatcagctcctgcttcctgacctgcttgagttccagtcctgactttctttggtgatgaacagcagtatgaaagtgtaagctgaataaaccctttcctccccaacttgcttcttggtcatgatgtttgtgcaggaatagaaaccctgactaagacagtggctaaccctataggaagcattatggctaatattactctgagtccaaaaggaagaacatacgtagtaattcctatctctcagtgtctactttgacttccaggtttgtcgtgggagtagagctgaagacctagtcgctgtcatttctggaaggtgacttggagagatctcttctacagatagtgttttcttgccctggatgttttggatccacaaggtgacacttgtgactagtgtttgaatgggcatctgtggttaagcctgctgtgctgactggccctgtatcaaagtcgggtgatcagttacctcttagccctggagttagcttttgctaagaggaatattgaatgtcaggatagaaggcatagccaagtgaactagcatgcaggtcccataccagctgtcaggcttaggcacaaggttcctctattcacagcacccacatatgacatttgacacatgacatctgcaaatagacatttgtgagacattgaaaacagagtaattactatttgcctgagagtaggtgcaaactctaagatctccactgaatgagagaatccttcctcctgccatgtgaaacgtgggaaataatttgtcttttatagagatggggagattttcctggtctgtcttacacggctagagactgtggagcagcagactcaggcaaattttattttctcatacatccctatcctgtactgaggccaacatgcaatttgctctggtggagtctgggtcccttccaagggaaagggtacgtaattctggggatgtcctgctatgctagtatattgtgaatttaacccattgtactcaagtattcaattctcatagccaatattttttcttcatagttttttgttgtggttgttttgggttttggtttggtgtggtttggttttggtttttctagacagggtttctctgtgtaggcctggctgtcagaaatctgcctgcctctgcctctcaagtgctgggattaaaggcgtgcgccaccactgcccagcttagttttttaatatatctgattttgagtattattttataaacttcagagttacctgcattagacttaatttttgaaaacatatacacacacataacacacatatatacacactgtgtgtgtgtgtgtgtgtgtgtgtgtgtgtgtgtgtgtctatgtgtttcaagatacggtctctctgtatagccttggatgtcctggaacttaaactcagagatcctctgtggtgatttgaataggaatggtcccatagattcattgtttgaatgcttagcccatggaaagtggcactattaggaggtgtgaccttgttggaggaagtgtgccactgtgggggatggtgctttgagttctcatatatggtcaagctgcactcagtgtggcacagggtttcctgctgctgcctgcagatcaagatgttgaactctcagctccttctccagcatcatgtccgcccacatgctgccatgtttcctgctatgatcataatggactaaacctctgaaactaagccaaccccaattaaatgttttcctttataggagttgctggggttatggtgtctcttcacagcaatagaaattctaagacatccaccttcctctgcttcttgagtgatggaattaaatgcatataccaccactgccaggctacagaaaaatatatgatgagagatgtaacttgatctctttttccaatcttaacagtgtaaatgaattacctttgtaatataactacaaatatacaaatatctgtatgtacaaagattgtatatacaagtaatctggggacattaagaacattaatttataaagtggatgatcattttttttacttaaatcacctttgtttcaacaatttacagtaagtaactctcatgaagttatgattttataaaccaaggtaattaatttaaccctgttaaaatttttgagcctttgtcttttggtctttttagcctcagccccaacagaagccattgacttatggttaaacagtattctttttaaaatatcatgagatataataacattaataaatacgttctatttgttgtaagaagtttttcaactgagggtgttaggcaagcactatgtgtttctactggggctttgcccagcatgcagaacaactttcccatagctgcatagtgactacagactcctcattttagtttttagcctctataccctcatttctcctgaaaaccttgagacttcatacaattagggcctaattgcttgcaactagctcaaggagtgactggttattactgtgagggcttaatggtaccccccccttaaaggaatattaacatctaacaaacccagccgggctgtggtggcacacgcctttgatcccagcacttgggaagcagaggcaggcggatttctgagttcaaggccagcctggtctacaaagtgagttccaggacagccagggctatacagagaaaccctgtcttgaaaaaaaacaaaacaaaacaaaaacaaaaaaaaaaaccaaaaccaaacatctaacaaacccagttgtgatcgctttgaacagacacagcaagtttttttaaaactttttattaggtattttcctcatttacatttcaaatgctatcccgaaagtcccccatatcctccccccaccctgctcccctacccacctgctcccacttcttggccctggcgttcccctgtactggggcatataaagtttgcaagaactatgggcctctctttccactgatggccgactaggccatcttctgctacatatgcagctagagacacaagctctgggggtactggttagttcatattgttgttccacctatagggttgcagtttcctttagctccttgggtaatttctctagctccttcattggaggccctgtgttccatccaatagatgactgtgagcatccacttctgtgtttgccaggcactggcgtatcctcacaagagacagctatatcagggtcctttcagcaaaatcttgctggaatatgcaatagtgtcagtgtttggtgtctgattatggagtggatccccagatggggcagtctctggatggtccatcctttcatctcagctccaaactttgtctctgtaactccttccatgggtgttttgttccctattctaagaaggaatgaagtatccatgctttggtcttccttcttctttattttcttgtgttttgcaaattgtatcttgggtattaacagacagcaagttatgaaaatggtagttatttggcttaaaagatactgggcagtagcttcttaataaaagaatgcatatatatatgtacatatatatggtaacataataaattaatattactgtatacacaatgtcagatcattaggctttgtatgtttctggttaataaaaatttttttaatttaaattgtcatgtgacatctaacagaaattagctgactatgatactggaattattattgagagatttagacagggtcccttttatcttttccatatatgaacatcccattagctaattctatcagagacaccttgataccatggtataaacagtagtagcctctattggaaacagtttacctcttaactgttcctcagtgtacagtgcctttcctgggatgttctgtggctctcctccttgtcacagaatcatggggccagcctgacccaggacaggggctgtggagggcactttgagacaaacacacttggatctaaagcaaggaggccaagtcctatctccagagccagcttttcagtgagctaaaacagcatttaataattttaaaaatattatccatactccaaaagagtacatttttcttttatttttattgtttatttcatatgcacatacgttttgtctgcctgtatgtctatactccatattcatgtctggtactattgaagatcagaagaggatgtgggagtccctggaactggagttacaggtggttataaactatcatgtgggcactggaaactgaacctgggtcctctgcaagagtagccaggagtttgtttttctttatgactgaattcaatgagctatctatccataagcagtttgtatgtgggtggagatagaggcagacagcctgaaaaacttaataatctttccttttataaagatgtcaggttggtttgtaggataatataagggttctatgaggcacagacacacacacacttggccaggccctacctaccatctgtctgtttcatcaatttcacaagtgcacatgcatacacacacgcacacacacagacacacatatttgatgatttgatgggtggagcagagccccaacagccacacttttttttttgtttttgttttttcgagacagggtttctctgtataactctggctgtcctgtaactcactttgtagaccaggctggcctcgggcctcaaactcagaaatctgcctgcctctgcctcccaagtgcccggctcacactttattttttgtctcagcctttgtatacctccttagacaacagatctttataaaattacctcttggataaaatgttatgtaaaagggagttacagcaggatgtccatagtaagttcaaagtagtgtttcattctataagctcattataagttcaaagtaacagtttcacatggccttgctttgtcatagtgcacacctgtggtttcatccttggacctgcttagaataaattttttccatgatcattaatttattccaagcctgtttctcttcttagcgcaatttatgaaagcttgttgtattcgttattacacaaccttgacacaagcttcattctatgggggggggggcggggcgtcatgttctattcttgattctaactttattacatctttctggcaaaacaactaaaccgccaggtgtggtagcgcatgcctttagtcccagcacttgagaggcagaggcaggcggatttctgagttcgaggccagcctggtctacagagtgagttccaggacagccaagaatacacaaagaaaccctgtctcgaaaaacaaacaaacaaacaaacaaaaacaaacaaacaaacaacaacaacaaaaaaacctaaaacaatttctgaagctttcttcccaaaatttgaatcaaatcaggagtcctataaagtcattaattcacctgaacagcattgttatataaaagttcatcttcgtattgatctgcagaaaatttgcccaatagggtaggctgatgcccaggaatcgttaggctatgtcatagtggcaggaaaagcatatcagcagtgaaaagcaatctctgaggtccttgcctcacagagcaccatgcaaaaaggtaggcatctccagaaaactcacttgcttcccataactacatggcttctgtcaaggaagaggagacaggcccaggaatataagagacaaggaagtccttgtggttgcagatattcactaggggagccaagaatattaaacacacaggaccgtctacgcagggaagatgtacaccctgatttctgtccaaaaggctagagtagactagcaaccttttatgctatctgtatggccaagaccacagcagatttccccgctccgctccatacttttatcttgagcctgttttcccagttaatctatagaacctatctttatagaagatgttgcttgtactttacacagaattccgatgtactcatctctcaagctctgtcatgaacatgggattaagctaattatcatttacaaacttcttttcaatttctgctgtgcttaaatatgcctgaaataaaatacttgaggtcagactttcaaaatttgaacctacaccagctattgagtcatgttgaaacaaactgcccttttgtctctcagggatcaacacttgctggctgtggtgttcacacacacacacacgcacacgcacacgcacacgcacacgcacacgcactaggagagctatagtcccaagaagggaggagagtgggtctgagaatgaaagacaagacaaggaaaacagagtttactggaactctcaatataatcccagggaaaggattaacaccactcttgtaacaaaggcacatggggaacaggtctctctgggctctcctgttcttaagacaacaagagggacagggcaaggcagacacacagggaacaaggatcaagatctccctggagttcttgcactactcagagcagatttcacttcaccagtaagttggctctctatctcaggagacttaggtgtttcttttctttttttaaatatttttattaggtattttcctcatttacatttccaatgctattccaaaattcccccataccctgccccccactcccctacccacccactcccactttttggccctggtgttccctggggcatataaagtttgcatatccaatgggcctctcttccagtgattgccgactaggccatcttttgatacatatgcagctagagacaagagctccggggtactggttagttcataatgttgttccacctataggattacagacccctttagctccttgggtactttctctagctcctccattgggggccctgtgatccatccaatagctgactgtgagcattcacctctgtgtttgctaggccccggcatagcctcacaagagacagctatatcagggtcctttcatcaaaatcttgctagtgtatgcaatggtgtcagcttttggaggctggttatgggatggatccctggatatggcaatcactagatggtccatcctttcatcacagctccaaactttgtctctgtaactccttccatgggtgttttgttcccaattctaagaaggggcaaagtgtccacattttggtcttcgttcttgagttttatgtgtttcgcaaattgtatcttatatcttgggcattctaagtttctgggctaatatccacttatcagtgactacatatcatttgagttcttttgtgattgggttacctcactcaggatgatgccctccgggtccaaccatttgcctaggaatttcataaattcattctttttaatagctgagtagtactccattgtgtaaatgtaccacattttttgtatccattcctctgttgaggggcaactgggttctttccagcttctggctattataaatagtatttgtctttcttactagttgaaacatcttctggatatatgcccaggagaggtattgcgggatcctccggtagtactatgtccaattttctgaggaaccaccagactgatttccagagtggttgtacaagcttgcaatcctaccaacaacggaggagtgttcctctttctccacatccttgccagcatctgctgtcataaaactgcaaagctttgtaaggcaaaagacactgtcaataagacaaaatgccaccaacagattgggaaaggatctttacctatcctaaatcagataggggactaatatccaatatatataaagaactcaagaaggtggactccagaaaatcaaataaccctattaaaaatggggctcagaactaaacaaaaaattctcacctgaggaataccgaatggctgagaagcacctgaaaaaatgttcagtatccttaatcatcagggaaatgcaaatcaaaacaaccctgagattccatctcacaccagtcagaatggctaagatcaaaaattcaggtgacttaggtgtttcttacctgtaggtggattccaactgctctcactgagccctgtgaagtcacctccatttatagcccaatcagattctgcagcttctgccagatttccagctcagcccatgaatcctgtggtccagatgcaagcaaactagtttgcccgatcatttacaattttgctcaaccattcattcactcagccagaaccagaaaaccaggtcttttacaactggtgttccaaagtaaagagacagtacaggg

SEQ ID NO: 588 - DNA, 4674 bp, Mus musculus
cgctcttcggggcgtggtcaacgccgccatttgcgggccactaccagctagtggccgcggggccgcctcgtcccgcccccttcctgcctgggaccggccctcaaatcgactgctcgccgccgcagcgagggaagagggtgcggccgccgcggcggggactgaggcacagactgacccggcgtggaccgcggagatgctgggcgtggcggccggaatgaccaacaggactctgaactctcaagcttgtacaatggccttcccaggacgggcacgcccgtgcactatcccagagaatgaagaaatcccccaaacagcccttaacagcgtccttgaagctaatgggaatgaagacgagagggctgtgtcaaacctgcagcgcaggcacagtgacgtaaaggtctacaaggaattctgtgatttttatgcgaaattcaacatggccaatgccttggccagtgccacgtgtgagcgctgcaagggaggctttgcgcctgctgagaagatcgtgaacagtaatggtgagctgtaccacgaacagtgcttcgtatgtgctcagtgcttccagcagttcccagaaggactcttttatgagtttgaaggaaggaagtactgtgagcatgatttccaaatgctctttgctccctgctgccaccaatgtggtgaattcatcattggcagggttatcaaagccatgaacaacagctggcatcctgagtgcttccgatgtgacctctgccaggaagtgctggcagacatagggtttgtcaagaatgctggcagacacctatgtcgcccatgtcataatcgtgaaaaagccagaggccttggaaaatacatctgccagaaatgccatgccatcattgatgaacagcctctgatcttcaagaacgacccttaccatccagaccacttcaactgtgccaactgcgggaaggagctaactgctgatgctcgggagctgaaaggggagctatactgtctgccatgccatgataagatgggggtccctatctgtggcgcctgcaggaggcccattgaagggcgagtagtgaatgccatgggcaagcaatggcatgtggagcattttgtttgtgccaaatgtgaaaaaccatttcttgggcatcgccattatgagaggaagggcttggcctactgtgaaactcactataatcagctgtttggtgatgtttgtttccattgcaaccgtgtcatagaaggtgatgtggtctctgctctcaacaaggcctggtgtgtgagctgctttgcctgctccacctgcaataccaaactcacactcaaggataagtttgttgaaattgatctaaagccagtctgcaaatactgttatgagaaaatgccagaagagtttaagaggcgacttgccaaacgggagagagaagcaaaggataaggacaagcagagaaagagaaagccagtgtgaataaatttgtggaatttgacatgaagccagtctgtaagaagtgctacgagaaatttcctttggagctgaagaaaagacttaagaaactatctgagaccttaggaaggaaataacttttggtgtcttttttctctctcttctaatcaatgttacttaacctgatctacccttgcttaaaactatgtcagagcattagaatggttttcttcatttcccttttctcatttaaaaacgaaagaaaatgtttatttctatgtaaaacacagatgaaatcaggactttcatttctttagccatattagtctgtaggcattaaaagtatataaccaaaaacaaaaacaaacaaaaaaaaaaggttaaagggtagttttaattaagccatccaaaatataaatttaacttcagagttaaacaccctgctctatggaccaaccaaagcacttgctgccagcctagtactaagttgaatccttaagagagtatctgagacagtgtccacatgggtcatgtggagcaagaacttactcccacaagttgttctctaacctccacagatggccatggtgcatatgcgccaacacacagttaataaacataatagacaaccactgttataaagagtcagctttcacgggactcacataagctttgcttccctgatcgcataagaaaatcatttcccattcatatactgggaactgtatgggaagataagtgcccaaacagttcctatgttgtcatgtgcttatccagttagcattgtaaaaggaacatgcatattactaagaagcaaaaacatttcaggatgactgatttctttttttattaaatcactaagcttagttttctattttgttctccttataaatttttccttcataaaattacttaacatacttgtaactactaatgcatcttttacatttttaagcaaaacaaaacaaaaatttgccagttatctggaaaatattgcatacattgtgatgttggggaaatgaagcattttaaaactatattacacataaaatgcatagtattcaaatgggacatgaaatgcactataatgcagcttcgaatgtatggctttcaaaagtgagcgtgagccaggtgtggtggcactaggcttcaatcccagctctctgcaggcagatctctgtgagtcctaggccacccagggctgcatattaaaaccttgtttcagaaagaatgactgtatctcgtattatctttgtgctaatatctatacttcatacataatctaacttgccttgccttagaaaactgcatcctatatcaggaattctagatatttcttataatatcaaaatgagtattttgattgagattcataaatttagaatcattcaccactgatacatactttaaaaattcttttctcaggaagccagtgaaagttaattcctgtcctcttattagaactatgctgatatactaaaacattttaatgaaggcttttttatttcaaatgtcataactgggttttgtttactataaagcagtaaagcagtataaatgatacctttagactgaaagagggtggtaagagtatcaactctaaggaaaaattggggagttctactttataaaactgtttatcctgaaatgtctgggccattctgtttgtatgaactcaatatgcaagagtatgaacattttttaaatttttctgctgctaacatgttaccttctttttcagttgccaagatatattttgcaaatactgctgaatataatgactcacattgtagtctcagcatttgggaggctgaggcagaaagattaccaggagttggagacaaatcctaggttacagtgtgagatactatcccccaaaacatccccacaaacaaaaacactagtgtattgttttgccgtaaagaatatctctggggcctaggaaaacgttcagtcagtaatggactcacaccagccttaggacctgagtttaaacttggagggagcagatccctggattttacgaggtagccaaactcagcctaactagtgagccccagatccaagggggaaatcctgtattccaaaaagcaaggtggatgcctcctgaggaagggccgcctagactgatccctagcctccacatccacacacacacatgcacacattcagaaatatggatgtgtacacacaaaaaggatatctcaggatgctgttactctgccattaaaagtttataatcatgaatttttaaaatacttgattatgcacattatggaatacatttctgtttccagataactaacttgtaaccaatcattttatttcctaatatccttttcatattaagagaattatatgtgactaaaaatatacatgatttgtgtttgttaagcattttaaatttgtctttgcttttgacaataagaaccaaaatttcttccgtgtgcctttgtcagctaagaatgactagcagtggctaccttagaagtatttatgaactattgtacatgcgtttaggcagatagaacttgtagtctagcgtcttgatgtaacttacatacctcactggaagtatggagcagaaaagcactcattcccgtgctttccccatccctttcgaggtgtgtggccttgcctgactgcctttgcttacgtgacatcgcttaagccagagtccccactgctgtctttgctcacttctcttcagacaggaatattccagtaagtttgatctcataattatgtggtaattcatctagagatggtgcttttcactgtggggtaaatcattagagcccttagtgtggaagatggaggtctaaatggggccaagacagagacttcatctacttcctattagttgtggggtttcactggctgctggcatttgtcagtgaacatctgtttgaatttctgagaacaatctgaaataattcattgtgcttatgaaatttctaagtgccctttttgtccttatcctaatataacatggaaaatggatacacaaaaaagattttttgtgtcatgttcaaagccttattataacactttgcctgaaataggtcattttgcctcatccatttgccaaattagccaatttcaagttagggaaactttgatgtaggctgacaatatccttgtattttattttagattgtaagcttaatggcaagaaattatatcaataattgtgctttttatgtagcaaccattgctgtgtacttttggtgcttaataaatattcataattattc

SEQ ID NO: 589 - protein, 475 aa, Mus musculus
ALRGVVNAAICGPLPASGRGAASSRPLPAWDRPSNRLLAAAAREEGAAAAAGTEAQTDPAWTAEMLGVAAGMTNRTLNSQACTMAFPGRARPCTIPENEEIPQTALNSVLEANGNEDERAVSNLQRRHSDVKVYKEFCDFYAKFNMANASATCERCKGGFAPAEKIVNSNGELYHEQCFVCAQCFQQFPEGLFYEFEGRKYCEHDFQMLFAPCCHQCGEFIIGRVIKAMNNSWHPECFRCDLCQEVLADIGFVKNAGRHLCRPCHNREKRLGKYICQKCHAIIDEQPLIFKNDPYHPDHFNCANCGKELTADARELKGELYCLPCHDKMGVPICGACRRPIEGRVVNAMGKQWHVEHFVCAKCEKPFLGHRHYERKGLAYCETHYNQLFGDVCFHCNRVIEGDVVSALNKAWCVSCFACSTCNTKLTLKDKFVEIDLKPVCKYCYEKMPEEFKRRLAKREREAKDKDKQRKRKPV

SEQ ID NO: 590 - DNA, 115829 bp, Homo sapiens
  misc_feature (1)...(115829): n = A,T,C or G
agcatgtgtatatgtaaagatgtgtttcatatatttttaatctctacatcctttcatattttgttatactctctttaaatgcaagcacttattttgaagtagttttaaatgttataatatctccaccatatgaaataaggaatatctgcactttcctccacccccttctctgagattactgcagccagaaggttaatgccttagctgaactcttaaaagcatttccgttatcataagcttaagaaatgtttgtcttagttcatggaatgtaaataatttttttttttttttttttttttggagacggagtctctcactgtggcccaggctagaatgcagtggcacgatctcagctcactgcaagctccacctcccaggttcacgccattctcctgcctcagcctcccaagtagctgggactacaggtgcccaccaccacgcctggctaatttttttgtatttttagtagagatggggtttcactgtgttagccaggatggtctcaatctcctgacctcgtgatctgtctgcctcagcctcccaaagtgctgggattacaggcgtgagccattgctcctggtcatgaaatgtaaataatttttaaatctagtttacaaagaaaaatgatgatgtagggatatcatttttttgttcctcaagaataaatttagtcttaaatttcaggttagcatcctggattcattatcctatatcactttttggtatgcattcatgggattttgtaggcagtttcatgccaaagtgttgtgttttccaaagtccaattttttttgactggtttaactaacattcattttgagatgattccaaattttgtaacaaaaacaacttatatttgaattttcacctttataattttaaaaaatctattctgtagccctgagatttggacaaaatggtaattatgttattttatggatattaaagctgaatataaagaatttttatcgaaccaagatgtcacagctcttatagtaagtggcatgattaagactataattttacttgtactcagtgtaccttctaccactatataatgtttccaagcatatgaacttattactagtctgtatctatggttttcagtgatgttaaatgtgtttttaaaaattttattaatatgtaatacacaagagtgcaaaaatcttaagtgcacaacttaggaattttcacaaagcaaaagcatggtcaaatgatttggactatgaattaatattaaaatacaatgaatttaatattggatgcctagagtctcttgattccagagaaatacatttatttttaaacttgtgttacacttccctgaatactcatttgaagtgtttctgatttcctcatttgctcatttgtttgacagtattcacagcgagcctgccctctgccaggcatgactggcatggggcacagctgtgaacaggaatcatcacttgtaacttgaggtcagactaaaggacacaggcaaattcctgtggagcaagagggccttccggagaacttcccagaggaagcgacctcttgactgagtccgagtgtgaatgggaatcatcccaagaagagtttagggaggaaggcaagaggcaccaggccaggagggctgttgagatgtgacaggcagatccgcagggctgcagcctgtgcagtgagggctggagctgggggatgccgggtgggagcaaggacagccaggtccgtttttactggcactgtagtttccttgattatcaacaacaggaatagactcaggcaaacagaagcttcaaagaaatttactggaaaaatactggggttgctcccagaattgaagaatgggctgaacttacaggtctctgagaagggcaaacaactagggctttcccggtgtctctgcagaacttgtgggatgtctctatagagcagtgctctgagttgacttcctctaactgcagggtgttagtctctactcagatttctagtctttgagaaatagtatctgattaacttagttcaagtccatagtccaaatggaccaggaccagtcattgtggccagaggataggaagaagcaccatgcctagtcaatcaaggtaggtgactgttaggtggtcaggacaactagatctgttacctgaaacagagagtggacgacatgggtacccatgtggatgacatgaccacccagaaggcagtgttacggtagctcagagaagaggtggtttgggaacagtgattaggaaagagggatgttcagaggccagttacaaggctgttgcattaatccacataggaggtgatggtgccagaagtagatgcagcctgtacagatataaagtagtaaatcgattcagaaacagttaagaggcagagaagaaaggactttgcagctggacattgggaggtgtgtgaggatgattaagttgttgaagatgactctcaggtttctcgcttggactagaaccattgtgttcatagtggtcccttgcatggaggagagagagtttcaggagggggatggggctttcattcagttatgaagtaataagttggagtatctaagcagaccacatttaatttaagaacacttgggtatgaacaacacttccccattaaattacttgtggggttccagctctgccatcagggccctctcactccagcatcgtggcctctgccaaggttgttactctctttttgtgtccctgggctgctgaaatcttctcaccgtattgccatggaatttgtaacgtgcttccttctgcttccctaccttaggcaggtttgggtctgagtgggttttggaatgagtattgttaaaggaagttaaaatgaagaccaggcctgtgaaatctctgagcgcacaaaaccagttaggccttatatgttacctcagccttgcttaaattgcagacataagcagaacaagtagagtcattttgataaatgtttatgttagaagtaaaacttaacccccgccagtcgtaagctgccaactaacatatgactaagtgactaggggctttccaacaaggtacctaaaaaaaggcaattctgtaatttcaaatcaatcaaataatttctttattttgcttctgcgtttcccagtaaatacttgtctctgactttttgtcattgggacactaaaacttttttcgtctggtgttccccaattcatgaattgcttcttactcaaataaactctttaaaattgtattgttcctcagatttttcttttatagtaactttcccaaactcagaaaggcccccagagcttaggggcttttaggactaagtgctgctatttagggctctttcttagatgttattatgtttagaagaggcttgctataggctgggcacggtggctcatgcctgtaatcctagcactttgggaggccgaggcaggcagatcacctgaggtcaggagttcaagaccagcctgaccaacgtggtgaaaccccatcgctactaaaaatacaaaattactcgggagtggtggcgcatgcctgtaatcccagctactagggaggctgaggcaagagaattgcttgaacccaggaggcagaggttgcagtgagccaagattgtgccattggactccagcctgggcaacaagagtgaaactccatctcaaaaaaaaaaaaaacaaacaaaaaatacttgctatatgatgacactgttttcttgatatagtcagagtttgaaaatatttcaagttggggacttctttgattaaaatgtaaagttgataaatgaatttagttacagtgctttagttttactagtattcaatgttgtgtgatattgatgagttaagtcaaaccctgacaagcggttcccttaggtacttcagtgagtacttctagcattaatgcttaatggcctcagaaatcctctgggtctgtcgtcctcagcagatctgaaactgttccctaaggagcaagtgggaacttgtggagcatttttagtttatctcgatggtttcaggaaaggggtaccataggcactaaatggcctgaggccagagatgctgaatgtcatgaagtatgcatccacaggactttgatgctggttaaaaacgtaagaaagaaaaacacctttgtataatgatgaacatagaacctaactgtgtttaggttgacatcatcaggtttaggttgatatctgtttcagatatcatcggctgggcgcagtggctcacacatgtaatcccagcactttgggaggccaaggtcggtggatcacttgagtccaggagttcgagaccagcctggccacatgttgaaaccccatttctactaaaaatatgaaaatttgctaggtgtggtggcatgtgcctgcagtcccagctacttgggaggctaaggtggaaggattgtttgaatccaggaggcagaggttgcagtgagccaagatcataccactgcctgggcactcaagcctgggcaacagaacaagatgttgtctcaaaataaaaataaaaaagataccatcatgaagtacttttcaacagtttcaataagcactaagttttctgggaatgccatgaaattataaattgagtgaaggatgaaatttgcttggactttatgctttattttcataggtggtactaacattaccacctatgaacattttgcccttaattgttcctttatattctatttagaaactcaaatcctttaagacaatggttagaatatattaaaaaggggtgttttttgttgtttttttgttttgttttgttttttagatggagtttcattcttattgcccaggctggagtgcagtggcgtgatctcagctcactccaacctctgcctcccgagttcaagcaatgcctcagcctcatgagtagctgggattacaggcgcgcaccaccacgcctggctaatgtttgtattttttttttttttttagtagagaggggtctcaccatgttaggcaggctggtctcgaactcctgacctcagatgatctgcccgcctaggcctcccaaagtgctgggaccacaggcgtaaatcaccacgcctggcccaaagggttttgtttttaaatgagagatggttagtaaactaatgttttcctgagtgacatagggcatatacatagagatgagcatatacatagagatgagtatgatgaacatttggggttataaatgactttcataacaaggacctatgaagagtatataaaggtggagacactgattagcacttgatagattgggtaaatcaagttaggtgaaattatcccagatttttttaaagtcccgggaggaaaagatacgcaagtgtattgggcattgaacaaattttttaaataaagatctatgtccattcagaatagtctgtggaaagcatttatcctgttattttgttgttgctgtttcttttttttttttttgagatggagtcttactctcgctcaggctggagtgcagtggtgtgatctcagcttactgcaacctctgcctcctgggttcaagcgattgtcctgcctcagcctcccgggtaactgggaccacaggcgcccaccaccacgcctggctaacttgtattttttagtagagatgaggtttcaccatgttggccaggctgattttgaactcctgacctcaagtgatctgaccgcctcggcctcccaaagtgctgagattacaggcgtgaaccactgcacctggctgttgttgctgtttctatgtgagactgataaaggacaaaaagaagatggcaagggatggatggaaaaggctggttcttctctcagggttcccagaccatagctggagataacccagggttgtagctccatctgctggagagaagcaaacccactcttacatagtctataaatgaaagtgatctctccacaatcacagtgagccagcctgtgtttgctaagcacttgctgtgcactgtgtaacactttgtcaggcttagggtaacagaggaaaaacatagacatgttccctgttcccaccatgcttagctctgagaggccttctgctgtcaagaagacttattttagctggtgtgcttttgcattctaggtttccccctagacttttccttgggtgacttttaaagccacgtaacctcattctgagcttcctgttccttattagaggtaaggaataacagtgcccctcctataggcctcagtttagctaaactttattaagtatctagtgtgtctgctaggcagaggcccaaggagcataaagatgagtaggaatctagtccctgccctccacaaggttagaaacaggagctcataaaatgatcctcgcggagtaaatgagaatgtataacgggatccctgaggaggagtgcgggatccaggcaggagagtcgactaggaaggtatggacaggttttctgagttgtttgaggatgtgagcattagcgaagggaagcccttcccagccgaggtcagcgtgagcagcagcatggagatgagggcctgtgtggtatgtgtatgtccctcttaggctgtgtaaagtgagcggcaggaagtgtccagggatgagggtttggggacatagatggagccaggtagggcctggagcagtagctcacgcttgtaatcccagcacttcgggaggccaagatgggcagatcatttgaggtcaggagttcgacaccagcctggcaacatggtgaaaccctgtctctaccaaaaatacaaaaattagccgagcgtggtggcacgtgcctgttgacccagctacttgggaggctgaggcaggaaaatgacttgaacgtaggaagtggaggctgcaacgagctgagatcactccattgcccaccagcctgggcaacagagcatgactccgtctcaaaaaaaaaaaaaaaaaaaaaaggcggggccaggcgatatagggttttgtgtgttaccttaagggatgctgactgtcctcagtgcagtagagaatttaagcagggtagtgatagcaggttccttagaccgcttgctggctgtgtctgttggatttgattgaaggggaccaggctggagacagggactccatctaggaggctgcggcatgcctgcttggataacgtcgccatgcctgagagagggcacattaagatgaagaattggatttaggcatggtggggaggggagtttattttaggcatcatgagtttgagttgcctgtgacgatatctgtatggagacatcagcagacaatttgatgtatgattgcgaagtttaagaaggtccagccagtgccactaacagggaggaagtagttgagccatgagatttgttgaagtcatcagggagaatgtgcgcaatgagaggagcagaaagccaaggtcaggctggggagtagccatacctacagccaggcagaggctcttgcaaaagagatggtgatgggatgacaagagggataaaagtacggtggtctggaagccaagggaatagaaaattcccaggaaagcatcatttaaaaatgtcaaatgtaagataaggactgaaaaatgccttctggatttggcttttaagagctgtgactgtaagaggtgtttccagattgcagtaggttgatgagtaaataggagttgagataacttttagaaaatggtgtctgaggccgggcgtggtggctcatgcctgtaatcccagcactttgggaggccgaggcaggcgaatcatgaggtcaggagatcgagaccatcctggctaacacggtgaaaccccatcttactaaaaatacaaaaaattagccgggtgttgtggagggtgcctgtagtcccagctactccgggggctgaggcaggagaatggcgtgaacccaggaggcggagcttgcagtgagctgagattgcgccactgcactccagcctggacgacagagcgagactccgtctcaaaacacaaaaaaaaacaaaaaaacaaacaaaaaaagaaaatggtgtctgaaaagagagagctgtgatggtagctggagagtgactcaagatagactcattttaacgtagcagaaactggagcctatttacaaactcttcgggggaaagagcccaaaaagaaggaaagtggctgtctggatgtgagtttatggactgacatcaaacagaccttgttgggactgaaggcctgaagagtaagcatataggtgggaggtagttgaaagagaactttccagataaactgttttcttcatgaataagtaataaagtaatatctgctgagagaagaaagggatgaggtcgattacgagaagaccttcaagcatggtacgtccttatgcgagtggcgcatggcttcaagaggagggttgatgggacccatccatgagtagagaagttaacaacaatgccagtctgcccaggatgttctgctgggactcagaaaaacatccagtttccttcctttagattttaactgcagcatcacgagctgccttcctagagggaattttgtattttggggctgtagctcagaagacttccattctcttttccctctcccaagagagatcgcagctgcttcccggggtttatgtccatgacataggactgtccctgctgggaatgggggagggaactgcttcccactcgaaagcagccttttcacttccagcttccatctgccttccactcccacctcccaaaataaagtaaataaatcaaagccagaaaaacattctggctggaattttattacattcagtattgtgtgagagctcccaaactagctgggaccgttggatttcagagtacgtgaaggtgaagcctgtgaggttcccccaggagtgctgggcagaaccctgagttttagaactccctctgcctttagcttgtcttggatgtgctcttccactctttcaagcactaaacccttccctgtaaatagtcacctgccagggtgccctcaggttatagcttgtcaccagctctaagagtggctagtacccagtctcagtgttggataacaagcaaaagtgatgagttgttttcttggggtttgtgtgtgtgtgtgtgtgtgtgtgtgtgtgtgtgtgtgtgtgtgtgtgtgtttggtttgttgtggtggtatgtttttgtttttgttttttcagagacatggtctccctatgttgcctagtctgggcctgaactcctgggctcaagtgatctcctatgtcggcctcccagagcactgagattacaggcaagtgtaagccactgcacctggccgttttcttgtttttaaagattaacctcaggccctagttatgttaccatcctagaaatgcagttatcctaaaaatgattcctctataataaaggaattgggtaaaggagctttcttgctgtattttcagtgaattcaggcaaggacaccctcattcatggaaggggaaggctgaattaattgctctcaagttctttcttaccttcaactaaattagatccctttattctccagtggaaacttggcactgaggagtcccaggaggtgactcagtcggatatgtgaggccttagcaccactggccttgctgcttctgcactgtgtctgtcagggatatctgggacagaaagaataatttccgctgctggggcagccagagcctggcgtgcccgtccctaagctggcctgcaccttgccaccggaagatgtagtgtagagtagctgcttgaccccagagtagcattcagagggcacataaagaagctccgttaattcaaacatgtagttattatagagatccagagggccagaggctatcatttttttaaagttacctctttctatgatgatcagttattcatttttctaaatatttgtctgcatgttatatgtgctttcagtaagtttttgggtgaatttcttaacttcataaagtatataaaacaacttagcaggatatgagttatgacatttaggggtgttgtcctattgcttcagaacagtggggttatcgtgtaacacaccatgtcacatgatttgactaaatacaggaaaaaaaaaaaccctgaacttggtttcattggctcaaatatagttcaagacaacagagacaaagctaagatgaggaagttctgtacagtttaggaaatagaggctttcaaagataattcgcagtgatgtgaaactggcctcccaagccctgataagtaagttaaataagagtaggagccaggagggaggttctttactcttgaattaagagaaggggagctggaggtggctcaggtagagtgcgtaggtttgcagaactgggcctgtgtgtgtaaagtgactaaggcaaaggagtggaagtttgagagaagtttaagagaagaaatggacatgattgcctaaatcagccaaacacagggtattgttgtatttctggatttgttttccttatgacctacctttctcagttatttaagaagcaaatctaaaggatatttgttgaaactctctatgcagaaagggtcttgggtgagttgtagtaaccttcagccatgctgattaaaattttctccctgctgcagaggttatgattgtggttcttatatcttgtagatgtgtatttaattattgaaatatgtgaaaactttgttttattggtttcaaagtagggtgggtgtggaagggaaactatgccttttgtttgcaaagaaaaatttaaaaacaattgataaacagtatttagtgtcatatggtttatatcctgcagagccttctataaaagaccttagtaatgcttttggcattttattacattaattttttaaaacattatttctgctgcctagggtctttggtggggaaatgtactatttagcaatatgtttagtgaacttttgtcctgtcatggtaagaagaaagcagctataactaagtaaggagttactcttattcattaacatgtaaaacgctgtttaaaaaaaaaaaactggtcatttttttaagttttatttttaattggcacatttatttatggagtacaatgtgatattttggttcatatgtacattgtacaatgaccaaatcagggtaattagcctatcaatcatctcaaatatcactttttcgtggtaacaacacttaaaatcctcttgaggtattttgagatatacaatacagtattattaattataatcactttgctgtacaatagatcaccagaacttactcttcctaattttgtacctgttgacaaactcttagtttcattgattctgttgtttttctagtctctttttcatttacttctgttctgatctttgttatttccttcctcctgctaacattgggcctagtttgttatttttctagttccatgaggtgtaatattaggctgttatttgagatctttcttttttgaagtaggtgtctattgctgtaaacttccctgttagcactaacttttgctgcatcccataagttttagtatgttgtatttccatcttcatttgtcacaagatttttttatatatctcctttattttcttctttaatttcccctttaattttttctttatctcgatagttgtttaggagcatattgtttaatttccacatatttgttaattttccatgtcctcctgttactttagaaactattctagtttcataccattgtgatcagaaaagatacgtgatgtaatttcagccttcttgacctgtcctggagaatgttccatgtgcacttgagaagaatatgtattctgttgctgttgggtggaatttcccccagcaggccactcttaaaggaactgtaatgcctcagacctacatttggaaaacatttattaaggggtgattatttacccacagaagaatcttttgctttactacatgacttgccttatacagtggacttcctagagatttaaatgtatttgcaaaagcattgattttacagttaaccttcaagaacattaagagtgataccgattgcatgtgtaaggcagtctcttatatagatgtatgttgtgtgtatgtacacgtgtgtatatatgtacattcacatacataatcaggaaataaggaatagttataatgaacaggagaacacaagtatttttcatggataagaaagaaaacattaaaaagaggatgatcattttaatttggtcttttagttgataaaaagggtacatgctttttagtttgcaaacaacaaggcactttgcatagctgatagaatgaaaatagaataaaatattctgaatgaacataaacacttggtggtagtttaaaaaatatacaaaaataactaaacatcaggccatcacaggtagtgtcaagtttttgaggctaaccaaaaagagcggggaacccccttcaattctaagagacggcaccatggaggtagtgacttttgagttgggctttgaagaatttgacaaatgatggaaaagagtgttgttctaggcacagttggcaacagctcgagcaaaggtttgcaggtcagtgttacttctctcttcagagtcctccattgcctttccatctcacctagaataacatccagtttttattctgggctgcaagtgctttctggatctaccccctgccctattcctttctgtgctgtgttttccgctttagcctggaagatttgttaaacaggggctttgtttcctcttgttcacctctgtattcccagtgcccagagcagtaagtgctcagtaaataaatgttgaatgaatgaaagaaattcaaaaattatctactgtgctggaatgtttgaaggataagaatggcagggagggagggtgtatgtggagtattggtcttgagggcagtgtaaagtttggggacattagggaagcatctgtgatgttgcagtgaagtgtttgctaatattacagtgtagagaatggattagaaggactaaagagcaagatagcaataccatacgaaaggatgtgtcagtgggtctttcattcagttgacatttgagtggttgccccatgctaagcactgtgttaggttctggggacacaaaggtgactgagaaatggtttccatgggtaatgccagatgtgtgaacatcctgtagcaaaggactgagcaaatgatgcggtggggcctgaacctgggcgttgtcagaggcgtgggaaggagtctgaagtctcattgatagtttcttgatgtcagtagttccgcaagttcccagaaaaaagaggaagccttcagtgaaactttttttaaaaaaaaattgattgattgacaaggtcttgctctgtcacccaggctacagtacagtggcacgatcatggctcactgcagccttgacctcctgggctcaagaaattctcctgctcccgcctcccaaatagctgtgactacaggcacacaccaccatgcctggctaattttttaaatttttataaaaacagagtctcactgtgttgcccaggcttgtcttgaactcctggcctcaagagatcttcctgccttggcctctcaacatgctgagattacagacttgagccaccatgcttggccttttaagggaacttttaaaaatgtttttagtttttttttttgtttttttttttgagacagagtctcgccctgtcatccaggctggagtgcagtggcatgatcacagctcactgcaacctccgcctcccaggttcaagtgattcttctgtctcagcctcccaagtagctggaattacaggcacgcaccaccatgcccggctaatttttgtatctttggtagagacgaagtttcaccatattggccaggctggtctcgaactcctgacctcaggtgatccacgtgcctcggcctcccaaagtgcttggattacaggtgtgagccaccacgcccagcctagttttgtttttttcatgcggggacttacagtgattttaaattgggtcttgcccaaaagttagccatatgttgattgacccattagttccaggagaaggaggtatacaggagcagtgttttagctctgagtcggtgtgtcacttctgaggcgcagtttgtcagaacagttacaggatgaaatgttgatgtcctgtagagtgcttgattaaaataagtgaagtggcaggtggggaggtattttataccccaaatgttgccacaaatgtatgataatattgttgggagaaaaggatactttatcagcccagatgggacatataatacagaatctaaaaaaattgaaaaataacttataccaatttttgtgtgtgggaggggggtgtgtggagaacaggcagagattcccttatagggctttaaaatgtgctatgctgaaagaaagtttgtttgcagcctgggaagacatttagactaccaagttcttcgggttcagctgtttatggtctttcttgtcacttatttaacagtttcagaccataaggagcgtatacttttctcacttgttctttattcattgagcctatttatccttgaaatactgtggtgtaagttgaaagaccttgggtttaaattttacttctgccatttgtgtgattttgaacaaattatttaatatctgagttgcagattcctcatctgtaaatggcaatagtatttaatctgtgagtagtgtatgtaaaaggatcctagcttgatatttggtgggatctaggtgaacaacaaatgttcccctttttattgtattaatagtaaaatgtatataacattcagttgtggaggacacttgggttgtttccataccttggatattgtgaataatgctgctgtaaacatgggtgtacacatacctgtttgcatccttgttttcaattcttttggatatatacccagaactggaattgctgggtcatgtggtaattctatgtttagctttttgagggacttccaatcattctctgcttttgttttttagtttactctgcatcatttatgcatatctcctttaagatccagaattactagagttcagggtttgaaagcaactaaattcactttagtgcctgatagtctcatggtttttctctacttccaaacatatctaaaccttatccaagcctcccactgtgtgacttctactgtgaaaaaagccattcttctctttcttttgcttttttctttcttaaatcttctccccttcgattgccttttctttccctcactaattctttccttctcaccgcctgccttctataaaggaatgctggggaaaaggtcttgccggagttacttctccatccccactctcaagcctacccagacctggagttgctgtctttgtgaaaagggacatagacacagaatgatatccagatgctagattacgtcaatttacaataaactttaatttaagccagactttcagaacaattagcacctgtataatactaaaaaatgccaagtatctgggaaaggttgggtggggaaggagaaaatagtatcatccatggggatgattcaactcttagggctgccagcctagcacactgctagcaacagctgggaagaaatcataaagtgaattttccacagataaaccagccagaaataacaccagactgccaagtcagatgtgatttcttagtcataaaaggtacttttcattcctgtaatcctgattggcctggtcagtaattaaaagtcaacattcagttttattttacttatttctaggaccattgtagaatccttcagtcattacatatctggtgagaccctagtggtaagtaaaggatatccatgcacttgaggggaaggaagtgttcacacatgaaatagctagaatagtaacaaagctccctttaaattcagacaatagcagtgagctactggtaacagcccaaaggagaaaatgagcagcagccagaattttgagattaattttaataatttattaatgaatgcaccagcagagaagaggtgggaaggatatggtcgacaagtggtaggagtaaaaaattcagctgtggggaaggggtagcttttgcttagaaagttcaccacagacccctgccctctaagttatggtgaattctgtggaagtgattagagtggagaaaaaggaacaaagagggttggaatccagacgttccatgactaaccccaagatgactaaaccagctactgaatgcacccacagaaagggaagtgacatttactgagaacacatttagtgttgctgaacgcttaaaatgctttctttgtgttctcagtccttaccagtctgtgaggggggtttattttgtctacattacagatgaagaatctcacctgcaaatgaagaaagttggctggccgacaggagatcgtttgaaatgaaaggattccagggtttctttctactgagcgtattcaataagcagggcttattatactatctagaatggtgctatcctgtagaaatacaatgtaagcagcatgtgtagttttaagattttctagtagccatttaaaacaggaaaaaagagatagggaagattaattttaataatatgtttaatttaacccagtatatcaaactgtcatcatgtccaagctatatacatatcatgtcatcagcattttaaagttaccaggagaattcagtgggtactttaaagtccatctgaattcagactagccacatttcaagttgctacatgtgactactggctaccaaagtagacagcatagctctaaaaaaaaggtagacagactcatcctaaaaaaaaatcgaatgtagaggccctgctttgaagtcattgagaggaattatggtggggcaagaaagcagcttcacctgagatggaaagctctgtggaaggaaggtaccatacataaaagcagggctgctcttgaaagaatgtgaccatatcatgcaaggacattactgactgaagggctatttatggagagcagtaaggtcataccgacctttatcaccactgccagtcgtgaccacaggaaggccctgtggtgttgactgctagatgctgaaccgtatttgggtgggggttgcgaggatgctgtgtcttggcaaatctactaaccattaggagtggaaaccacagcctttaatgtatgtgtggatgtcattcccaaagaatcttttcttccagtgcctttttcagatgaggaggtgtaatgtgtgcttgaggaagtaagcatgaacaaactaccttatatgggaattcccagacctcagctccacccagaccaagataaatgatggtttcagactgctattccagcaaaacagggaccatcctatatttataatattcagtcatttcttccatgctttcttactttaaaaaatgttcttgaaattttcccttggtcttctttcttcttgtgattctgcctactttgttgcctttgtcccacttaactattttcttcagtttttcccattgtacttggtttattttgttgttgttgttgttgttctgtagtcaactgtgtactaggaatcagtgtaccccccaggtcctgttcttggctctcaactgtgggactttcattctgttccttcatctgaaaaatgaaaaacattagaattagagtcctttataatcttttagggccctcattttgcagctcgtttggagcctcttttttttattgtggtaaaaaacacataaaatctaccaccttaatcatttttaaactcaacagttcaacagtgttaagtacacaagaagttgcacctatgataaaatgtgaaataagatctagaggcttgaggagaacctgaggttatctgtggagggtggaaggcttatgctgaagtggccccctgagagcaaagatcaggagtaagggacgatctcctagtattcacttgcagaagtgacttaaagctgctaaaaggatgtgtgtcagggctttggcattctgccgcagacatagaaagacctgatactgttttgacttcatgtgtccctgtagccattcagcggccaacatttgtatagtactttatctttctcagcttatttctaattagcgataattaatactcttagtattaatacgagttaatttgtaattcttacaaaagagtgtgagataaatgagcatgtgctgtctttaatttccaaaggaggaaatgaaagggtccgtggaagatgagctgtagctgtggaaggggcagaaaagccagagggtggctcaggagtctggtgttatatatgataacattttaaaaataagaggtgaggaaaatgggagcacactttttggaagattaacataaatgtaaaatgatttacagaacagatcaatggaattcagttaggtctcagattttactttccccattagggatgtatgtaaagaaagggcatgttggccgggcatggcacacgcctgtaatcctagcactttgggaggccaagatgggcagatcacctgaggtcaggagtttgagaccagcctgatcaacatggagaaacctcatctcaactaaaaatacaaaattagccaggcgtggtggtgcatgcctgtaatcccagctactcaggaggctgaagcaggagaatcgcttgaacctgggaggcagaggttgctgtgaaccgagatcacgccattgcacagcctggacaacaagagcaaaactccatctcaaaaaaaaaaaataaaaataaaaaggagggggacatgttgaggcaataggaacttgaagtacttgggatggttcattaatttccctacgaaacatctgtttttttttttttttttttttttacagagtcttgctctgttgctggggtgcagtggcatgatcttggttcactgcaacttccgcctcctgggttcaaatgattctcctgcctcagcctcccgaggaagctgggattacaggtgcgcaccaccacacccagctgatttttgtatttttagtagaagtggagtttctccttgttggccaggctgatctcgaactcctgacctcaggtgatctgcctgcctcagcctccaaaagtgctgagattacagatgtgagccactgtgcttggtcaaaacatcttaatttgaccttttttttttattcacagaccactttgagactcaacacttaacgacattcatagaagaaaatgcacaaaggcacatgcatagaaagtttttgtataacttccaggaattcatgcccccagtgcagccacagcaacacgtgattgtaatgatgattgcatttctgaagactttttaaaagcatttttttggatagaagagttaaaatgttgtgaattcttgataaattgaataagcaacaaatacactagcagtcactagagggtgatgttttctagcatacaacatcaagttctttccggcaggttgccattgtaggttcctgtgtatgtgcttgcttgtacgtatgtctgtgtgaaagagacagaggcacacacacagactgtctctacctgcataactaaaagaatttctttgtgcatgtttcttttttctccttttcacttatctataatacaagcaaaaatgcttttttttttttttttttgcgacagagtcttgcatgttgcccaggctggagtgcagtgatgcagtctcagctcactgcaacctctgcctcctaggttcaagtgattctcctgcctcagcctcccgaatagctgggattacaggcgcccgctgccacacccggctattttttgtattttttagtagagacggggtttcactatgttggcaaggctggtcttgaactcctgacctggtgatccgcccgcctcggcctcccaaagtggtgggattacaggtgtgagccaccacacctggccagaaatgctatttttttaaagccttctcccacctgttctacagatgaattctgaatgttttctaatatatccttgtttctcatcatcctaggaatagctaccaattatgagcacccactgtggttggctgtgcactgggtggcttatgaactttacccctcatccctacaactgcagcgtgggctatttcatagattaggacatgatgtgtaagtagctggctcaaagccctccatctagtaagtttgccagtatatcatcagttcatagtaaactaaaaaaatgtctactttatccaaacttttttgtttataaatgaatttttgtcacctggtatgtcttagatatgatttgagactttttgttgttgttgacatagctttaataaaattaacataaactgtgactttgtataggctaggaggaaggagagactgaggagtactatgtttggaaggaaagctgaaggtagggcagccggatggttagctttgcagataccaggccagtgagaagaaaacagctagttcgatattttgcttaggattaagccctgatggttggatactagccatctggggggtggtgggtggggaatccttttgggagaacggacggagtgtgggaatgaggccctggccaggcagatgtgtgccagtctgacactgttcatttcttctgttgtttatgccagttcaggcaacacggaagctgtgtctgtttctcctgtcattgtaaacgtagccctggtctttcaaaaagctgtggttgtgtgggtctttaaggtattccttcagtaattgtggtggccactatttcatttaaggagttagcatcttataaagaaaaatctgttttctcaaggctctatagtaatgatattttgtttaagtttgtccaatatggtatttagttcttcctattaaggaggagtctctaaacttcagtctgtgggccaaatctacctcctgtttctgtttaattattttattggggggggtgatatttatcccctcaagcatttattctttatgttacaaacaatccaattatattattttagttatttttaaatgtccaatctaattattattgactgtagtcaccctgttgtgctatcaaatactaggtcttattcattctttctaactaatgtttttgtacccattaaccattcccttcccattccccatctcaccactacccttcacagcctctggtaaccatctttctactctctgtgtccatgagttaaattgttttgatttttagatcccaaaaataagtgagaacaaatgatgtttgtctttctgtgcctggcttatttcacttgacataatgatctccagtcccatccatgttgttgcaaatggctggatctcattcttttttatggctgaataatactccattgtatataagtaccacattttttctttatccactcatctgttgatggacatttaggttccttccaaatcttggctattgtgatcagtgctgcagatatctctttgatatactgatttcctttctttagtttatatccccagcagtgggagtgctggatcctatggtagctctatttttagttttttgaagagcctccatactgttcttcacagtgattgtactcatttacatttccaccagcagggtacaagggttcccttttctctacatcctcaccagtatttgttattgcctgtcttttggttataagccattttaactggggcgagatgagatctcattgtacttttgatttgcatttctctgatgatcagtggtattgagtaccttttcataggcctgtttgccatttgtacgttttcttttgagaaatatcttttcatatattttgcccattttctgatcagattattatatttgatttttttactatagagttgtttaagccccttatatattctggttattaaccccttgtcagatggttagtttgcagatatcttctcccattctgtggttgtcttttctctttgttgactgttttcctttgctgtacagaagctgtatttgttgtttttgttgttgttgttgttgtcgtttgagatggagtctcactcactgtgtcgccaaggctggagtgctgtgacgcaatctctgctcactgcaacctccgccttttgggctcaagcgattctcctgccccagcctaccgagtagctggggctacaggcacccgccaccacgcccggctgattttttgtatttttagtagagatggggtttcaccattttggccaggctggtcttgaactccttacctcaggtgatctgcccacctcggcctcccaaagtgttgggattacaggcatgagccaccacgcctggccttgcagaagctttttaacttaatgtgatcccatttgtgcatttttgctttggttgcctgtgcttgtggggtattattcaataaatttttgcccagaccaatgtctttgagagtttgccagacatttccttgtactagtttcatagtttaagatcttagatttaagtctttaattcattttgatttgatttttgtttatggtgagaggtaggggtctagtttcattcttctgcattatggatattcagttttcccagcaccatttgttgaagagactgtcttttcctcagtgtacgttcttggcacctttatggaaaatgacttcactgtaggtgtgtggattttgtttctgggttctctattccgttnnnnnnnnnnnnnnnnnnnnctgcctcagcctcctgagtagctgggattacaggcacccgccaccatgctgttctgtgcgggagatgcctgagggggggaagaaaacacacacacaatacctttaagggtaaacaagctttatcccacgtaaatggcaatgcagatataataaacaaatgatataataaacaaattgcaatgaaaaggggagaagggaaaagatatatatatatattttcttacactcaccaaactatggaggattcatcaccagaccgggaagcaacagcctgggctccagagtcagacacttgtccgtgcacagcgagggaaggtctcatgaagtttcggtgcagtctgggactctagctgttttcgtaacaagttgtttggcatgagacccagtcacgagtgcccttcgtgactgggcttaaggaacacaaaaaggtcacaacttgtttttgcgattgtctattgttttttaataactaacgtgtaagaatagattgaaatagagatttctctgaaacagcgatggatgaatgcctcaaggggctcactcaacctgtttcaggacttagtgaccattgtttgtgtccatgttcaattgagttcaaatttaatatttaacttttcctccacacacatgcctggctaatttttgtatttttggtagagacagggtttcgccatgttggccaggctggtctcgaactcctgaactcaggtgatccacccaccttggcctcccagagtgctgggattataggtgtgagccactgcacccagcctagaattgtttattctatttctgtgaagaatgtcattggtattttgataaggattttattgaatctataaattgctttgagtagtatggacatattaacaatattgattctttcaacccatggaatgtctttccattttttggtgttctattcaattttctttatcagtgttttatagttttcattgtagagatgtttcacttcttcggttaaattaattcctgggtattttattttatttgtgtctattgtaaatgggagtactttttaaatttctttttcaggtcattcactattggcatatagaaatggtactgacttttgtatgttgattttgtgtactccaactttactgaatttatcaactctaatagttttttggtgaagtccttaggtttttccaaatataaaatcatatcatctgcaaacaaggataatttgaagacttctttccaatttggatgccctttatttctcttctctgattgccctagctagcacttccagtactgtgttgataacagtggtgaaagtgggcatccttgtcgtgttccagattttagagcaaaggctttcagtttttccccgcagtatgatactagctgtaggtctgtcatacatggcttttattatgttgaggtatgcttttatacccagttttttgagggttttttaaaatcatgaagtgatgtcaaattttatcaaatgcttttttagcatcagttgaaatgatcataaggtttttatccttcattctgttgatatgatgtatcacattgattgatttatcacactgattgatttgcatgtgttgaaccatccttgcatcctagggataaatcccacttgattataatgaatgattgtgttgttgaattctgttttgtagtattttgttgaagaattttgcatcaaaattcatcagagatattgacctgtagttttcttttattattatttttgttattgagacagggtcttgctgtgtcacccaggctggagtgagtagtgcaatcatggttcactgaaacctcaacctactgagttcaagcaatcctcccatctcatcctcctgagcagctgggagtataggcatgtgccaccatgcctggctaattttttgtatttttttgcagggacttatttgtatttttagggtttcgtcatggtacccagccaggctggtctggaacacctgggttcaaatgatctgcctgccttggcctcccaaaatgctgagatttacaggcacgagccactcgcctgaccaggttttctttttttcgatgtgtctttttctggttttgttatcagggtaacactggccttgtagaatgagtttggaagtattcccctctcctctatttttcagaatagtttcagtaggattagtagtagttcttctttaaatgtctggtataattcagcagtgaagccgtcaggtcctggccttttctttactgggagactttttattatggctttgatctcgttacttgttattggtctgttcaggttttggatttcttcatgattcaatcttggtaggttgtatgtatctaggaatttttccattccttctagattttccgatttattggcatatagttgctcatagtagccactaatgatcctttgaatttctgcagtatcagttgtaatgtctccttttcatcgcctttttttttttttttttttttccacttgagacagagtcttgctctgtcacctaggctggagttatcttggctcactacaacctccacctcctgggttcaagtgattctcctgcctcagcctcctggctagctgggattacatttgacagagttttagctcttggtcaggctggtcttgagctcctgacctcaaatgatctgcctgctttggcctcccaaagtactgtgagccaccatgcctggcctccttttaatctctgattttatttatttaggtcctctatttttctcagtctgactaaaggtttatcaattttgtttaactttttaaaaaaactttttattgaactttattatttcttttcttctattattaattttggatttggtttgctcttgcctttctagttccttaagatgcattgttaggttatttatttgaagggttttttgttgttgatgtagacatttagagctataaacctccctattagtactgctttccctatatctcataggttttagtatgttatgtttccattatcatgtgtttcaagaaatttttcattttccttaatttcttcactggcccactagtcattcaggagcatattgtttcctttccatgtatttatatagtttccaaaattcctcttgttatttatttctagttttattctggcctcctattttttttacagcgtgtgagctaagaatattttgaccttttttaatggttgagaaaaaaataaaaggatgatatgaaaattatatgaaattcaaatttcagtgttcataactaaagttttcttgggacacagccacatttacttctttactattgtttgtggctgcttttgaaccacgagggcagggttgactagtcaccacaaagactttatagcctgcaaggcctaaaatatttactatctggccttttacagaagtttgatgattcgtgccatagaggagttgtagcaatttttgaaaacttaacattttcaaattttagacggttactgcattcagatcttttatccttagcctctcaaattaaattttgttctaatagaaatgactggatattaacatattttaattaccttaaaacaagtcttgctcctcatcccccttcctcaagatgggtttcttgtaactagcattagttagcttccgttctttctgtcctggaagagcactagagagttgtctaagaccacccccactgcccctgctcctctgagttggatgaaggatgaaacaggggaccagcaggagtagagtctgttggacagacagtaaggcagcatctcaactgtacagagcacttggtagtctgaaatttgatctccgccaggtaagagcaatttacctgcaggaaggattgatgggtcagggattaatgccacatagttcctttttcactggaatccagttgtctgatgattccccaccttgtgagtctgaacaggatactgaagcttgctccctcttgagaatctggaagggccagatgactgccttcctagcctcacctgcagctgcagctgaggcacaggaatgtgtcttgggctctggccattaggtacacctgtattggactgtgacctgagagctagagatgcaaagaaatagggattgcctggaatcatttctggagagcacggttgtaacagcactcatgacacccattgtttaggggcagcaatagaacctggtgtgagcagcacagcccagtacccagcattggtccatgtggtacactgtgtccaaaggtgtagggctggggacagacttcccctgctgggcaaggtgttgttataagctcggttctttgttaatcctgcagagtctgtgagcattcaaatatcatttattaaatatctcttctacttaaaattaacccaaggtggtttctgttgcttgcatcttagaaacctacatgtgtcaagctaaagagctcactcaaaatacctaattttttataaaattttttaaaattttccatattttgaaacttactgaaatttattcctttcagcatcttatgctgtccccattttcctctttattcattccaaaaatgtctgcccagtacctactacatgcccagcacatggcttcacataagcagaaacacaagcagaagaatgtgtcagtgtttggacttagtgatgccccacttagagaatgccatccagtgtagtcttcatccttataaccaagttcattttatctgtgtattgtgggccatattagactacagtgagggacccaagagcaacttggaaagaaaagaagtcagattatcctctgagagtgaaacttcaaacttgacacaggagtagagctctgtagtctcctaaaggggatggagtggctctggatgtgtatgtaaagaaaggacatgaccatctgaaaggcccggtgagcatggaagcagcagttgtatgggcagtcacagaggtgaagctggcaaccaggcctgggggccaggcagcgtggccctcgggcccaagtaccaggttcctgctgccagctctgcccccagtttgggggaggtgaatctggctgttgtagtcactgagtattcagactgtataactatttttatgaattcaggcacaccagacaaccttctaattataacttaggttttcatttgacctgtgtctaggagagaacacattacttatgaaagctagatattttagtttgcaagttggagttgtggttttacacgtcagttctaaaagttggtgaatgaggatgcttgagtggcaggtctaccttagggtgctgacaacattcattgctcagcttcagaagctgaaggtcagactttacatttttaaaaattcaccaaggtgggattcttcaccaaggtgaagccagctggattcaccagcaaactctgtcactgaaccgaggactttttttggaaggggggcggatttcagtatatgtgcatgtgtgtatacgttagtaagaaaaaatcacaatttgtaaggtacttttacaattttattagcactatcatgtttgtatgaagcttctgaactgaattcaaccattcaagaagcatttcttaggtacctactgttgccaggcttgaagagctcacatttcagtgaggaagagcaaccaacgtataaacaacacacaatacagcaagtgcaacaaaatagatttgtctaaagttcagtaggatcccagaggagaaaacagcttccactgcctccctgggggagctctggaaggctccaccaaatgggaatattgtgggagtcctatgtgaggagagaggctggaggttcatccacatagagaaatggtagatcctggaaacacaagagtgtgctgagtctagggaagtggttgggaaattaaaatatagcacaattagttgttagaaggggaaaagtgattggaatgaggccacacaggtgagtatgcagtaaagggtatgtctcatgtaccatgctgctgtggtctgaatgtgtctccccaaaattcatatgttgaacttctaaccccaaagtaagagtattaggaggtggagcctttggagagatgattaggtcacgagaacagagctttcatgaatgagattactgcccttataaaataggcccaagggagcctgcttgccccttcctgcatgtgaggacacagtgagagggtgccatctatgagcatggagagcttagcttggacagccagctgatgagggacacatcgaatcaagatacatgacatggtgagtgctgctgcacaatattgagctgttccccctccaaatgaaacacaaatagaacataattgagcacaccagttgtctggtatcttcatcacataaatagtacatgtgtgcacatatagaagtgatttttacacaagggtgtatttttgtgcatctagtaggattcactatggtttcatttttaggtatttctctctaacctggatataaccagaaaagaggtattgatctctctaataaatttgcctattaaaagtactaagttttacaagtgaaattattaataccatgggcggagttccattttactgtattctttttgcttatttacttctgggtcttaaagtcaattcacaggtcctcatttacctgttaattgtgcctgaaacccagtctttcccatctgtttttactagtcttatagtttatatcccttaacttttctcgtcttcctttgagtgggctcctagcataatgttttatgtcttctgttttattaagcattatttggaaatggatatgattttaatattggttatgtatcaagtaggggctccttgggctttcactgtgggtaacattcatgtgatattggtctcagagttaatgccccttttgtcctctgaaaattgtgtgcctgtaacatcttcaggagccacatggtggcaggcgcagtgctttgaaactttgtggacttacatactcagagtgtttgctttgcatcttcatctttccttcttttaaaaataatgaagatattgaaattaataaaaggaacctccaaatatctaccacccacctcaagaaataacaccttacagagttgaggtctcttggttcagtttcctcttccaatcacattccctcctcctgttttcctccacgaagaagccctttccttaatggagtttggctcacttttgtgcatatctttatactttcattacacatttatgtattcttaacagtgcatgggattccgtctttcctttaggttttccttggtgtatactgtttgtgtcactgtgcaagttgcctttttcactcacttttttttttttttttgagacggtgtctcgctctgtcactcaggctggagtgcaatggcgtgatctcggctcactgaaacctccgcctcccgggttcaagctattctcctgcctcagcctcccgagtagctgggactataggcgcccgccaccacacccagctaatttttatatttttaatagagacgaggtttcaccatgttggccatgatggtctctatctcttgacctcatgatctgccctcctcggcctcccaaagtgctggaattacaggcgtgagccaccgcgcccggcccactcacatttttaaaacatttatttgtgtagatgtgtgcttcagtgaattttcttttacagctatacagcatttcattgaagacatcactattttagaaatctgttttcttgatcttgagagaagcagggtagtagagtgatcatagatggggcccctgatgcccattccagtccccattctgtcactcaccagttgggagcccagtttctacttccgagaaatagggataccgctcatttcacagggtgttagggggatcaaatgaaatagtatgtgaagcattaacaccatgattattaccgtcattactgccactagaacgagatgacagtaatgcagactcagggcaggactaattttgtgctatattttaacttgcagttggacggagggcactctgaaagaagtagggacaatagcttggagacagctgaggtggcgtctttctgaagacttctgttttctctaacataggtggggttatctcccaagagtaatagaaaaagagggtgggatcggtgattcgagagtactgagggtttgaagtgttctcatttggggcatgatctggctaaatacatgcaaaataatttcctgtgttggtgtgtgtgctaatcttgtttgatttttttcttagcaacctgtttacctggcaaagcataaaggcttctcctctggagtcttctcttccctcccccatggcaggtgttgctgcctggagctgcttccacaactggttgtctccaggattgcacccctccccacccggaattctaaccttgtgtggcttatcacctgtcacataaacccatcagcctggctctcactcttcaaaagctgactctaaactgcccggctccccgcagtcattgctcctactgtttccagagtgaggcgcccactgttccctggctcacttctccaccttcccatgcctttgcattctcctctccatctagaatattctctcctcccttttcctggtgccattctttcacaatgtaacatatcccttaatgtatttcatatgatcttgggcaatctatttaacatcctcagatatgatacttcagatctctcattagaggaagcacccagaaaacccaggagtcctgacctgatgccttctgctgtgctgtcggtgcatcacactgcacacatatacagcagtgtatgaccttctggctttaaggaagttatgcttgttttcatccccacggttgaagtttttttttaacttaaaaatattttattggccgggcgcggtggctcatgcctgtaatcccagcactttgggaggccgaggtgggcggatcacgaggtcaggaggtcaagactatcctggctaacatggtgaaaccctgtctctactaaaaatacaaaaaaatttgccaggtgtggtggcaggcgcctgtagtcccagctacttgggaggctgaggcaggagaatggcgtgaacctgggaggtggagcttgcagtgagcccagatcgtgccactgcactccagactgggcgacaaagtgagactctgttacaaaaaatgtgtgtgtgtgtgtgtgtgtgtgtgtgtgtgtgtgtgtgtgtgtgtattattataaaactattcttttttattttctaaaaatagagatggggtctcactatgttggtcagggtggtctcaactcctggcctcaagcagttcttctgccttggcctcccaaagtgctggaattacaggtgtgagccactgcacctagcctgaaaattttcattctaatataaaaatagaagaaacaatccttatactcatcacccacacttcttgccatatttgcttcacatattcttttttcttttcttttctttcttaattatttaaaagcaaatcccagacatcaggtcatttcatcccaaaatacctcagggctggtccctgaggagatggacattttcttttataagctggtctctgagaagatggacatgctattaccatatctaacaaacgagtgataattctttatcaccatccagtaccccacccataatcaaatgtcctcacttgtcccaagagtagcattctacatttgttttctttaaaccaagatctaaacaaaggccatagtttaataatacatttgattgatatgtctgttaagtctctcttaatctgcaggaaaaccccttctctgtttttcctccagtcattgacagagataccagctctgttgtcatgtagaattaaagttttgaatttttaaaataaaccttattttggaataattttagatttatagaaaagttgcagaggtcaggagctcagataatcctcacatagtcctcacctagcttcccctcttgtcagcaccttccattatcttcatcatgtcttttttctatgccatcaatcagtcgaggataccacattgtgtttagccgtggttgaatttttaaatgatttctgattataagttctcatctactgctgagaaaaataaccattttctgactagcaggcagtacaccgttatggtttaaaaccaggctgaggccaggtttcagtttttcactcaattacgtaataactgtatagtaagttacactttctatgtcttgtctcatcacctttgaaatgggaataataatagtactgtttcattggattattgtaaaaactaaatttggtaagtgtatgcaaagtgcttatcacagttctgggcgcataagaagcactcaatacatctagctcttgaccaaggtgctatttcctaaattatattgagccccggggaaggaataatcagagcctttatttcttccccaaggctctgatttaaaaaataacctatcaatgttttttttcactttccttagaaatagtgcacttgctttggttctatatagtggtctcattacattttgaggtatttcacttctattttgggaatttttgttcagtagaacatagttccctagagtgttttgatcaatcaaaaatattggctctaggctgggtgcagtagctcacgcctgtaatcccagctctgtgggaggccggggcgtggggatcgcttgagctcaggagttcgagaccagcctgggcaatgtggcaaaaccctgtctctacaaaaatacagaaattagctgggcgtggtggcatgagcctgtagtctcagctactaggaggctgaggtgggaggattgcttgagccagggaggcagaagttgctgtgaaccatgatctaaaatatatatatatatatatacacacatatatatacacatatatataaaatatatacacacatatataaaatatacacacatataaaatatatatatacatatataaaatatatatacatatattatatatacacatatataaaatatatatacatatattatatatacacacatatatatatacacacacatatacacacacacacacacacacacacacacatatatatatatatatacatatatatatgccctaagagtgagttttttctcttggcaggggttcttgagatcaggattggaggattaaaacttcaggcctttcttttattagtctcacagagtgactggtttgatttgtgttttagaattagaatcaccttcttcaccagacttcctttgcatgaagcagtaggagcaagtggctgcttgaccagcttgagctctaaagtgtgtttgtggtatgaagtgttctcagaggaaccgaaatcggtgtggtcacacatcatcagtgcctcttcatacacccacgctctcctgaagtttgctgtttgtattgcttccagtgcgtgttgctgttcaacagtacccttggtttcagcgtagttgctatgatgaagaaaacctgttagaatctgccttttttttttttccagaactgttggaaacattgaataattccatgtactctaaaaggaaataaagtcttttgggtaatttggacccaaagactcctaaggaatctaggaattcagttacatagaaggtcacttctttcactagcttttgcctccaaacctgcaggagaaaaccagctgaagaggaatactcatatgagtggggactgcacctgagcacctcacgaggctcctttcagaaccctcaaaccgaccattcacaatattcacgtggactaggtctgggtcatttggagagagagaaggtgtgggctggctgaggtgtctgggtggtttctagtcagtgtttacactccggggcttgcgctgcggctcctgcgcctgtcatgcacccagtttcccagaagcttccggggttaggttgtcagtgttgagaggcagtgctagttcagacttgaccttgtgatggtctgtgggggagaatgttttaggccctgggacagtgcagtttaatgactgaaacaggaatctttgagtcaaatcaacttgggttggatccacacactcttattggttgtattgtttggtcaagtcgtttaactgctttaagactcagtttccccatctgtaaatgggtataatcacaatacatgcctcatagggttgagatggaggttaataacacataatgtgctgggtaggtactccaacgtcagttgttagtaataattatattacataaatagttgagagactgagctttacaatacaagcaaacatttttatgtcctagcttttttcttttgtaaactcgtaaaagtctttattattagagtcaaagtaggtttaaaacgcttacgtttctgtggacaagattaaggcaacatgaagtacatctggctcatgctgtagttcaccaggtctgtttgttgctatgtccacaaaagaatgtggggagaaacgttagcagtgtgggtgcttcctgcctccctccctggccctctgtgtccagtctgcccttctgccctccctccctacacatctctgtgtccactctccttgctgttctctctgtcaccaccctggctagctcaagctgctgtctgttccatggactgccatgtggctctgcacagctgtgctggtccttaccctggggcctttgctgcctcagagagaggggtcctcagcaaacaggtgggatcttgtcagtaccctgcttaagacacgggcggcccttggctctcagggtgaagaacaccaggtccttcgaaacatgccaccacccatgtctcttgtctcatttcacctcctagccctcccctcagccacagggtcaggccctcttgcttttgagcctggtttcttggatcagatccagtgtttctgtctcaggaagcttgcccctgctgtcctgctcccctccctgctgtcagcatccactctgcaccctactttctactacttgacatgttttaaattgtgattatatggttgataccagtgtcccctactcgactgcaggctccacgaggccactgagtctctgctgctaagagcagaccccagcctaggttagacgctcactaaaggtgtgtgaggtgcacagctgggttgggggcacaccaggcacccttctgtgttgtttcttatacttggctgatgacagactctccgcatgtgacttttgcttttttctcatccgctttaaacctgtgttcccggtttggaaggcccatgcctctggcagtctcatccccttgacaggtcctcaccatgctcgggcgcctcctccacgcgaactgccctgaacttgctctctcaccacccagaccctgcctaggcttccagtctctgccaaccagagatgtcctggtagacactcttccagatgctggggagggtgtggacacatacaatgtatgtacatatgtggtctttgcatgtgaaatagaatctcttagcttgtatcctatggtctttttttcattcagtggtagatcatgaacacacatttttatgccaaatacatgtttacattatcattttcagttgccatcagtcactctggcatagtaacactacataggaaataaaagtttttggaaaacttttgtctttagggctagatacccttaaatttctaaattagatttgtgtcattgaattgaacttttatatcggagttaggaaaaaataataaataaagggataatacagatatcagaaacgtggccacacagcttgttatgtgtgttgttgcctttaagattagactgcacacaaaacctggggagtattttgataacctggtaaaaacaattttgaagtgaaagttgatgtgttgacaatattggctatagtcatgaacctatactggggtggggcaggaattgtggtttattttttaagacacaccccttgaattccagggcagggagaagaaccgtttttgttctttctggtcttcagaatatcggaactgttagcttgcaagtaactgttacatttctcctctcacacagaagtatttaacctattggatttttttgtaatgacgatttagtttagaaatatgctgagcagatatagatacgctagaatctatagcgtatagttgtatgtatagttggtggtcaggcagaacggatagaaacaatatctaaaaagtgatttcaatacatatatatgtatctagttttaagtcaaattatgggaaaatctggatttgtggaaagctctcatttgtgaagagtaccactagaattccttttaaaaataagttcatttagggaaagaaaaattattctatgtgctaaagttttagctttatatgtagttttccagaagcaagtttactacattgagtgagataccctctattttgccctcagggaggaaaagtgcagtcctgctgcaagcttctgtctgtgttccttccctgaaaggtcagcgctctgttgaggaggaccctctgttctctttgggtcgggtggggggtatggtggggctagggtgatcagcatgcctttttgtggtccttatctactctagagctcttatcctcaagcagctttgtgaccaaagaaaaggtgttcatggagaaggatctggggagcccagaggctgttcagggttctcctccacaccccaaaggcctggcacactgatgcctttgggaaattgctgaatgtgcagagcctgcccatgtgtacctgctttattcaggaatgagatttctgactatatgaagaaggagaaaagtgtgcttagtcagggagtcatgttgcacaggtcctgtctgaaaaccaagtaatgttagcctgcagagaagaccatggaggtcacctaattcagccacttctgattcaagtggaacaatggaggactgtgatagttaaatgacttcctgtgtacttataaggtagtcacagcaagggagtttccaaacgtggaactgtcagctaaatgtctactggtcacctcttgtatccttccactaacctaccttgtactctcccttggccccttgaaaacgtgggattggataggttacttagaatttcattctaaattatttggaaatatacctggaaaatttgcatattgtatcagtggcttttgagaacatttgataatggtctaaattgaagactgttgatggccccatgttgctggttgtggaagaggctgctgtatgagaatgacacaggcaagtttgcatgggcttttttttttttttttttttttttggatataggggtcttactctgtcacccaggctggagtgcagtggtgtgaccatagctcactgcagcctcgaccttccaggctcaagtgatcatgatccccccatctcagtctccctcgtagttgggactacaggcactcgccaccacgcccagctaattttgtattacttgcaaagataaggtctcactgtgttgcccaggctggtctcaaactcctgggctcaagctgtctgttcacctcggcctcccacattgctgggatcccaggcgtgagccaccacactggcctcacatgagctttaatgacagctcagcctgtccagtcagatgtgtcagaggtccaggaagcctgattaaggagaaagttcagaggggcttgtagacagttgcaatattatctgcttgtgagtgggaccatattttcatgattttttttttccacacagtgaacagtttttgtggacagatgcttctgccttctcatactctctgctccagttagcttgaccttgagcctactcgcaatggtacatcgttgaacccttttctgcagcagatatatagccctgttcttccttcaaatttatagcctagagcagtcttgagaggcctcacttaggaagacagcttggctggcaaataaatgtttgccagatgaatgtgtgttggacatagtatggagggatattcttgctttattagataaaatttgattttccctgtaaatgattatttatgagataaaacataaactaaaaatgattcatttccatcaagtgcaaagttagctgcaaaacataacattcttcctttatgtcacacagggaaattaatggcctggaaatgtacagctgctcaaccagtttacgagccattagtacctagtgtactggcagtgagccccagttagccatggaaaccagcttgcagctttcttaactctgtataggagaaataattgatgattcagtaacattaatgatcatatttacagcttgatgtttaattaggtttctttaccctcttatatctgaaggggttaattgcaacaggatgctaaaagctggactatgacaagtttaggcaaaaatccaggctaattttttattcttatcacaaatggaaaatgtttatacttgtggaaggtactgttcaactccacaaatatgaaagcttcagagttttagtctcaccaagaaagtaaatttttccaatactgtagaagaagtgtgtcttttaaaatctcatttaggtaacattgagtgttacatgcagaaatgaaaaagcttcaaaactctggagatttcttctcaaacatgacattgtaaaatgattaggctctcaaaattaattggttgaacaactaaaacataaagcttgtttaacaaacgtgactgtcttccatgtccctggccctatagatgcagcggtaagtgggatatggggtttagaaaggtttctcggaagagatgatccttgtagtgagtcttagtgggatgatcaggagctagtcctgccagtgatccttcttccagtcttaccaagccatatgtgcaaaggctagaaagtgagaggaagcacagtctgtctgggaaactcctggagtccagtcctctcagctgggatgggggtgtgagatctgctggagtcaaagtacagattcaaggagaacccagcagtttggaaaaaaggacagaaagttgtaattagggccagaccaattgttaaggcaaatgtcttattcccagtttttgtgaactgttgttcctcaagaaccactgggcatgtgggggaaagccccaggagttttatgaggtagtaatttccccatcactgcaagtgtccatgaagagacaaactcccaggtcatagatattgtatagggatgaggccatggggaaaatgacggtggggaattctgcattgaatgagagtctggactgaccttcaaagatttttttagagtgctaaaatgaaaaatatctctatttggaaacccgcagaaaatgcatttatacaggcctccctctgtactgtcaaaatcatgctaagacagttatttgaaatttgaaacccttttaaatagggcctgatctgagaattcaggcataattaataattccatctccatgggaaagtacatttgaaaggaaaaatagatggggactcctccctgtctttgtcatggccctgctgtgtgtcctgggtgtttgcccatctgacccccttccctgtgctgatgtgctgctgtctgaagggtgctggggagggaaagcagtcctctctctctctctctctatcttcagtgaaaagatcctggttaggcggggcacggtggctcacgcctgtaatcccagcccgttgggaggctgaggcgggcagatcacaaggtcaggagatcaagaccatcttggccaacatggtgaaaccccatctctactaaaatacaaaaaattagccaggcgtggttgcgcgtgcctataatcccagctacttgggaggctgaggcaggggaatcgcttgaactcgggaggtggaggttgcagtgagctgagatcgtgccactgcactccagcctggcgacagagcaagactccgtctcaaaaaaaaaaaaaaaaaaaaagatcctggttaaaaaggccttccccaaaggcccagaatttaattttactcagctgtggcagtttcatcagaacataagcattgatttgctgaagttcctgtttgtcagtacagcctttttaaaagtcagagggcaagaattgtttcagctcgtttgttttatggcttggtaactgtccctgttactgctctcccccgccccgtctaaccccctgcacatccttttaacactagtctcatcaaatgcaggattcatcctacacagttaggtgtttcctgtctggttaacctttagtagtcaccaagttgttttcccttgtcagcaagctgcattaatttttaaaaactcttttaaaaataagcaattatttacatttcctatggagacaggtcatatttaatgttgggatttctgtatttacaatgaatatacaattgatttgtgttttattcattaggcgtctattctgtgttgatggtgggggaaaacaaggaagattagtggttgtttctgttctttttttttttttttaacttgtcttgattttaaaaaacgaaggctgggcacggtggcacacgcctgtaatcccagcaatttgggaggccgaggcagttcgatcacttgaggcttggagttcgagaccagcctggccaacatggcaaaaccccatctctactaaaaattcaaaaattagctgggcgtggtggcgcaaacctgtaatcccagctactggggaggctgaggcacgagaatcacttgaacccgggaggcggaggttacagtgagccgagattatgccactgcactctagcctgggtgacagagggagactctgtctcaaaaaacaaaacaaaacaaaacaaaaagaattggatacttcaggagttctaaattgaaatgtttctattactgtaaactaaattgtttggtatttaaatcttctacattctatttgtttttgagtggcaatatattcaaagttcagaaggtgtagagtggtgtgtgtagtggaaatgcttccttctgcttctgtctccccaggtccctcagaagcagccagtattaccggttttttgtataccctcccggagacagatgtaactgtcaactgattttttaaaacgtgtttcatcactcattaaatctagtgtagtgacaaaaatggtaaattttttccctgcatctttaaaaacatatgctgtgtttgaatggcaattatgaaaagtcatttgtttttcctggggccgtggacctagcgtaacaaatggtagccctcaggggaactagcatctgtgtcctaagtgaaggaataagatgtagacttccctttcctatgggttgccttaatttttgtatatatagagcagattctctcagagatgggaataactctctagctcttagtgtaaaaatattatcagacccatttctctgtgttcttgtcgagaaggttctaaaaggaaaagaggctggtataaattgcccagagaaaaattcctagaaccatttagtcaaactactggctaagatcttgctgggaggtagcctgtatttgtggtgtggtcctgtgttcccagtgggactgaagtggattggagggccgtgctgtgcctgctgttgggtagcatcactttgagctggatgacgaaggactttccccaaacctgtcctctgttgtacacatccccacacccaaaaccttcctaacattgtcactttccgaggtcaaatgtacagataaatacagggtatataggacccattccaccttaaagccaacagcattgtgtcagccggggtggcctttcctacgagagggcattattcacagccagtaattacaatgaatgaaggaagaaaccatcttcctttcagttatgaattcttcagtaatatttaatgaggggtgggtggaccaaagacacttccttcccttctgaagaggatttagagtggagtggtaagggggaggaattggactgcttcccgttagaattctgcccctcctctcctttttaaggaaaatgtccctaaggagctcactataaccaggcggttctttaaactgacaactgcctgtgaagtgttgatggatttcctggcaaataaaacagcaggacccttctttagcgactaccttactggagctttttagcccaattttagttcagagtggtcctggcaaggtttttaaaggaattggtgtgattattcataacaattaaattttgcttattaataaacaagtaagtaacctgccttcttggtcaccgcttcccccctccccaaggtgcgaggcccagagataaggcaagttgtgccttgctgaggagggtgtgtaccagtgagaaacaggaagctgtgcttcagcagcttggtctgcctggaggtttctaaggctgagtcaggtgtgctgaggtccctcggcaagggacgctgctttcccctggcagccacactgctgagcataaatgctttaaagtgtcagcaattgatgtgtggagagaagtatgactgcattacagcttaaagagctttcacattcaggtctctacaggagaagacgagatcgccccgatagtttgagagtaaatgggttaccagaggaagagctaaggtgagtgcaaagtcatggttggctaaaggtcaagacatctaatctagtaagtgcagtggggattcatgcctaagtggatgcagcgttgggaagtactcattgaaaagtagcctcttagtctgtaattaaaaactgaacacaatatcaagattgtactgattggaactgtgcaaaaccagaatacttttgcccatttcttcacaaatcctttaagttgttttaccccttctccaaacctacagtgttgttatgtctttaaaaattatataatcaccagaaatattttaaattgaaaacaactgatttttccacttagtttaaagagagttttctttggctgattggaacatgtttttgtctgtgttttgatgaaggtgggtagtttgtggtggtttggggttgggggaggggtgccatggagattgttactgaaatggtgtaacaaaggaatgcagtggaactattcaatgtagcctaggaaggaaggacatcaaaaacctggaaacctttttaactaaaaaggttagagttcttggctttcaaagtgaatttccctaaaacaacacaattttatttttttgttgcaactactgaaaatttcttagatttgaggttctgaaagcctctacaacattaagcctatgtgttaaaatactgcattaactgaagggtttagattttccctgttcctgggatgttcctgttttactgatgacagaaggctgcagtaaagagagacttcctttttttaaattacatttactgtttagtactttaatttggaggtcttgatttaagtgtttgaatattctgattagatggcgggaaggctatctatactttgtgtactattgttctttttcctacaaactaacttccagagtttattttaaattctctatttaaatgtaacaaggacaaattgacaagcttcaacttctctattaaatttgtatttgtcacagacagctatactacagtaactgtaatttgctaaagaaacatttattttaaaattgttgactcaccaatttttgaagagggtagcattaaaggactattattgacactaacattattagaacttatcgcttactatgtcaggtgtctcttagctacatttaatgtattaactttgaattgactggattaaacaatttaaaagtctcagagtttaaattgttaagaagtttgtatgtgaggttagtgaaaatattgagctctatattgctaaccagatagacaattggaagtgacctctgaaaccaacatttattggtagactccagtctacaatggatccaagagtgaagttaccaaaaacagttttaatttcagatttcggggtttggaggaatttccttttttaaaaaaattaagttatataaaaaaaattctaaaccaaccttttctttattttcagacaatagccaaagtactcatgagtaaaataacgtatatgccaaggaagtagttatttacatagttataatgctctttcaaacaactagattttttttttttttttttgcttagaatttaattaaaagaggaagaataattcttaagtattgcctgttctagttgtttaaagagaaatattttgtcacccattctggtgatgtagttatctggtcatagaagggacttgtatttctgccacttttgtctcctaatgtagagaaaatgatcattttccttattcagaagtataggttagccaagaaaggtaaaccattgtctgtttatgcctggctttttttttaatcagcttaggtgtatttttttttaccctagttatactaagcctattttcaggattaaatgaggtttctgagctaataggaatcaaagagagtaaggactttgaagttaggtacaccagagtttcagtaccactcagttggacaagttatataatttttttaagtcttggtttattcttttttaaaaaaaataaggataaaaataactactattattgaacattatttactctctcacagaactcaaaccaccaattcagtgaggcaggtggcattgttatcttgcgaatagtgccatacagttaattcattgtttaattgttattgagtgcctactatttgcaaagtaaagatacagtgaggaataagacacaggcctcgccacaggaacacccacctaggtttgggcatatttaatatgaccacagattttctctccatgaacaattatttgattttgaatacctgtgctatcaaacatctttcatactgtctcaagtattgcataagacccattccagctctcattccttcttactcaagtgttcatttcttacgtttgtggactcttaacagaaaaactttcagagactaaaattggccatggccactgccagaaaacattttttgctcttaaagtttaaataaaaggctgtgctctgaaacacgagatgcacgtgcttaaagagcactgtaatacacatgaaaatagttctggcgtcaaacttgaaattgttcaaaaccgaagcaggtaaaaggtggcatgacaaacactgggcttcctagacttttgttttaaagtattaaatatgacttgaaactgactttattcacatactttgtacagtggagcattacccactgtgtttgtggttacagttagagtgaagtgacacaagtgacatgcttgttccagtgggtcggaagccccagaccttcacaaggcattgacccttttttccctgaagtttttggtgtcccaaaataacatctaagatatacccatgtacctacacttactcctttagctattctatcttttaaattatgttgcattcaaacatagttgttttttgacaatacctgaatgacaaacacacctgagaaattcctgccctttaaaaattctcaaagttactttttctctgcctcagatagaagggatctataaataactgattagaaacagtacaaaattgaagtttctcctggttgggttcaaaacagcttaatataggggctggtggctggatgcagtggctgacgcctataatcccagtactttgggaggccgaggcaggcggatcacttgaggtcagaagttcaagaccagtctggccaacgtggtgaaaccccatctctactaaaaatacaaagattagctggacgtggtggcaagcgcctgtagtcccagctactgtggaggctgaggcaggagaatcgtttgaacccaggagacagaggttgcagtgagccgagatcgcgccactgcactctagcctgggtgaccaagcaagactatgtctctaaataaataaataaataaataacaatataggggctggtaggccgggtgcggtggctcacgcctataatcccagcactttgggaggccgaggcaggcagatcacctgagctcaggagttcaagaccactctgggcaacatggggaaacccagcctctactaaaatataaaaaattagccaggtgtggtggcgcacacctatggtcccagctagtgaggatgctgaggcacgagaattgtttgagcctggaaggcggaggttgcagtgagccgagatcacgccgttgcactgcagcttgggctacagagtgagactctctcaaacaaacaaacaaaaaatatatataggggcaggtgaacttatgaccctcaggccaaatctggcctgctgcctttttgtgtatggcccatgagcttgggatgggttttacatttttgaatggttgaaaaaataataaaaatatttttcacatgtgaaatatatgaaattcaaatttcagtgtccacaaatgaagttttactggaacacagccatgcttatttgtatgtgttgcctgtggtggttttctgctacgctggcaaagttgagttgtgacacagaccaatgtggcccacaaagacaaaaattatttaccttcaggcccttcacagaaaacctgggctgacccctggtctagtgctgagataagaactcctagagctttcccttttccctgttccttcggccatgcttctgccctcctcactctctcacctcccagttaggtttatcttgcctggataaaatcagggctacgtcagccatttgaaaagaatatgaatccccccccccaaaaaaatgcagtttgaaatttgtatccctaatagtttaggagtaaagtgaaaatgggaagttgccacacagcagcagtgagctcttcgcttcttagacctcctttcctcctttcctgcagcgttgaccttgaagtagtacccttctcctgattcctggatggatcaggttaaccaagaatggaagtgcaaagaaatgtaacctttactttctggttatagaataaaccttccaagctcatatttttatagatatagcatataaaatcatttttaagtggtgggaatgtccttgctttggtttgagagtgaaaactcagatcatgtgttcctgactagtacataaccattaattgaacccctgttataggccaggcactgcattaagtaagggcttttgtgtgtgtgggcccaccatgtctcatgatcccgtaagagagaaagaactgaaggctataaaggtggtcattgttatgaaaccagtttctgtccttgattcaaataagttagtgcttagaattcagtcaacgttggagtagctcagcctaggctgtgtgtttcttgcatacctcttttgcagtttgctgatcactttttggcccaacttttaactgaaaaattatgtttgtattttagttttagaaatgtagtctgttagacaatagggataaaattgcagttttgccattatcttattatctgatattatctgttcttattatttggtggttcagtgagggtacatttagtcttcccaacaatgagcaaacacatgggacaattaataagaaatatttttctctttgctataggaaagagaaaaaccacttgctagtgttgctttttaaaagttcatagtgcttactcctatatgtttgattgtaacctacaagtacttatattgtaataactggttttacagaccccctcttcacccactctcacctcccacccccatataatagagaggggattcttcaaggcaagagactttaccatatttcctgtgcatctagcacgtactgcagttcagaatctgtttctcattgaatgagtaaaggaatgagaaactaaactggcctaaaggtacctcttttattctagattaaactctttacactctactttttaagtcttaattattaactttttatttatgtacagtatcacactgagagaagcctaagagacggatgtatctatcagagtatagatcatgattattttgcttttctctttcagtagttttggaaagcttagtttccaaagggaaatgtatttttcagtcatctaaaatatttctgcatatagtcatgtgctgcataaaacgtttcagtcaacgagagactacaaacatgacagtggtctcttaagattacaaggaagttgccctatgcagatgtaccattttaatcttttaaaccgtatttttactatactataatatttttagctattttatatatacacttaactgttgtgttacagttgcctacagtattcaatacagtcctgtgctgtacaggtttgtggccttggagcaacaggctataccacgtagcctaggcatgtaataggctgtactgtctaggtttgtgtatgtttatgtgaacatttgtatatttatgatgttcacacatgactaaatcacctgatgatgcatttctcagatcatatccttgtcattaagcaatgtatgactagtagagggagtttatgctgaaattaaaaatagcagtgttgatgcttaaaaatcaggtctgttaaaggaatgataagaagtaaaaagttattgaataatgatccctttctggtttttttttttttttttttgcactgctataggagacatttaggaacgaaccgtcaactttaacagaatcaatctgtaattttgttgtcagtacgcatcatattatctaaattatttattgtgacaattaaatcccaaaatttcaataatttggttgctttcctgttggtttttaaaaaagcaaacaaaatcttgaagtctcaggtataaattacttataaaagtcagaaaagatagttgtccaaaacttgtgctttacctacctgactttggatagatgttattaaaaggaaacagtactatttattctacatgtatgtatcttagagacacagcaactgattatatgtctgtgctactcattggctattctgtgactaaaacaaactttggacgtgaatattttcttatttaaaaaaatcttcttttagaagtaattattaaatatgtttcacataaatatgaacctccttaagtttttttaaatggttatatctgtttcctagggctgccatcaccaagtaccataaactgtgtagcttcaaactacagaaatttgttgtcgtagatttctggacaccagaagtcagaaaccagcgtgtcagcagggccatgccccctctgacccctgaagggagatgcttcctttcctctccaagcaccaggctttgcctgcagtgctgagtgttcttgacttgcaggtgccttgctcctgtttctgcccttgtggtcataaggccatcttctcagtgtgtctgtcttcaccacagctctggtcactttcccttgacttcttgaagtttgacagcagtaatactttcttcttaaaattgtctcctccattgtctcctcagccctgccttttcctagttttcctactggttacttcttttcagtttttcctttgtctttcagtgtctcccatggctcttgagtatgtatggctcagataccatccatgtgcagtcactgtcaaatcaggccaagagtcatttctagctctcacttaatgactagcaccagtttaaactagggatttccagttaatatttgtgaatcgataaatgaatgaaatgagctatgaaagcagtttattggatcatttattgaagaggcagtgaaatcaatgttgcctaggctgcagtgagccttcgcctcccaggctcaagcaattctcccacctcagcctcccgagtagctggaattacaggcgcaccaccacgcccagctaatttttgtatttttagtagagacggggtttcaccatgttggccaggctggtctcgaactcctgacctcaggtgatccaccctccttggctcccaaatcgctgggattacaggcgtgagccaccgcacccagcctcagtgcattaatttttgaagagaaatatgacagtaatgagttttatgaaggttcttgttttttctgagacagggtcttgctctatcacccaggctggagtgcagtggcacaatctttgctccctggctaaagtgatcctcagccttccgagtagctgagactgcattgaaatatttttttaaaaagcagaatacttatttgaccatctatgcttaaagcaatatcagtaggtttggtgtccatcataagcagctgtgcaattcaacagaaacgtattgccatcacctttgtctatctatgttgccatctgctattatagctgtttaaaggaagactgttgtgtggtattgggaggaaatggtacattttattgtcagaattctaattgatcggggtaatgagaatgaaaaaatggcagtgttatagggaagaagtattcgtatgcgtggaactagaaacggatcacaacttacatgttggcttctaatttgtaatgtttcaaccatgttcggatggaaagaagatgtataggattgtttccaaaaaagtttcttctctatgaatgaacttaggatggtcttcagagatatatataaagaaagagaggagacagagactgaaattgactgcttcaactgtagtgagttaactttcactcataatagaaatagctagaggttggattatttcaaaaagccagtcagtgtttttagagcttctgattctcacaagaacagatgaaaaaatgcaagtatcagttatagagaagactttccatttgagactctcagaaaaggtgtgggtggttactgtgtttgtttgacattgcatcctttaatgagcttgtttagtacgtgaggaagtggaactttaccttgggcctctctgaagcccagtttcctccaaatataaaaagaaaggcttggtccattcagaagctttaaagagtcatttttttcccagacaggatttccctgtggattgtggtatgtgaaacaaagtcagtgattctccatggaggtgatgtgaggagagaaggctatgtggcctagactgcagattcctttcctgaggtccttcctttgtcccatggcagctgcagaggcgtcttggtttaggagatcaagatttgaaaaccaggtgaaggccaggcactgtcgctcatgcctgtaatcccagcactttgggaggccaagccgggtggatcacttgagtccaggagttcaagaccagactgggcaacatggtgaaaccatatttccacaaagaaatacaaaaattagccaagcgtggtggcgtgcacctgtagtcctggcaacttgggaggctgaggctggaggattgcttgagcctgggaggttaggctatagtgaggtgagatcataccattgtactccagcctgggcaacagagtgagaccctgtctcaaaaaaaaaaaaaaaaaaaaagaaagaaaagaaaaccagaagacagcctgcctcacttaaaattgtgattttaaaaacagtgaaattcaggcatccctgtagtgagcctccttcgaaattcactgcactgctataggaaatcagagcttaattatgtcacacttacatgctgaagaactcagggatccaatgatacaatgtagggaatttgtttcaaaatattttatggttgatgagtagataaattgatcacgacttgatgactgttggagttggataatggttcagagggattcgttatactcacttgtttaatatatgtttgaaatcttcagtaatcaaaggttttaaattttttgaaatacgtatcatgacgaatggcacagttttaacgtttcccttatgtgtaactaacacattatactttttcatttatttagggcttatctgatgagtggttgtgtcccatccaaacatctatcccagtagtcaggaatataacaaagcccctgagattccctctgctgtcagctacctgtgtgtctgttgggatataagccacaccaggatttcaccacccatggctctagcatgagtaatttggaggttgagtgggacgaggaggaaaaatgtaggattctttaccttaatctaggctgtcgttctatggtaatcattaagctttcatattttgtgttggaaaaaaacagtatttcttaatgttagaaagtgaaaatggtaatgtaggggtaaaagattagattcagaaaaatgaacatctcaagttactgcttttacatctgtggagcagggatggaattgtttgatttttcagacaattaaaatttattatgacaggatgaagttggcttacagagtgtgggacacttaatgagtcagcttctagcctctggcttaagaatggggtagactagcctctggcttaaagaatggggtagactgacttggactctcatttaactgaagattttattttctatacctttacttgataatatatacctccgcccttcccttcctagttttgagtgtaaatacacttgttttaagttgctgagtgagagtgggtgaggagtctgggtatagcccactggcctgggtccagtgtcttgaataactacttagtaattgacttctgcaagtcagttatttttaggagctttgagtttctccctttgctagttgaatatgatctgtaaaagaagtgaatgttcttatattaacagatttagacctactcaaggaggatttattgtgtttcattttaaatatcaaatgattgtatgctgtggaacaaaagggactctgtcttggatgctaatctaccgtgttgccttttttttttttttctaagacatctgttatagcatgccatgttgacttctgattagcctcctttgagacctttgaatggctcctgattactactttacttactgtccctagtggaagaacatgtcaacctggatgttgtcacacagactccaggctgtgatgcgtacggcatccatgttctggagggttgtctgcacacgtgccctttcttcatggtctgtaagccctgggtctgggagcagtggtgcagagatctgcctgttttgtggctgaccaagaccacacttctgtctgtaagttccctcagtaaatcacccaataccaacaaaatagatttgtctttctccttctttagtttctcagctccttcacatttggaaccgctttgcatatatgcctccttcacagaataggtactttcgtgtttgtttgtttgttgagatgcagtttccctcttgtcacccaggctggagtgcagtggtgcaatcttggctcactgtaacctccacctcctgggtccaagcagttctcctgccttagcctcctgagtagctgggagtacaggcgcctgccaccatgcttggctaatgtttgcatttttagtagtgacgaggtttcccattttggccaggctggtctcgaactcctgacctcaggtgatccacctgccttggcctcccaaagtgctggaattacaggcttgagtcaccgtgcccagctgatactttccctttttactctttgggaagccacacatgtttgaaaagcagaaagttaattgctttttacttcctaagtaccttgtgtcagtgatttcatctgctaaattcagccatcttctctgccttgaaagacaccatgttaaaagttaagtgctgatgctgcataggatgtagggtccaggtgtctcaaggtcaggcaacgcgcattctcagagtgtgatgaacagtgaaggaaaactcaagggaggatatgcccagagtcctgatgttctggacaccttgttctttatcaggcagtgctagatcttattgcacaaaatggtatttggggccaaatgaatggtaagcgagccaaagagaagcctctctgcctcctcagctttgaaaatgtaagagggaatgcagatactgctatagaatcaacatgtgagtagtggcacttcagcaacttctacagagctgtacatgagtgcctgggattgtggcctcagagaactggaatactggctcaggctacttaaatgtagatgaaaatattaaaccaaaaggaaggtaaattgaccttgaaaagtctgtttatataagcagtttacttacaggcaatctgtacctgcatagcaagtgtacacattgatttctgaatgagaaagcactgacattgccttatgagccattatgatattgttcttctgattatgtttgtgctcaggttaataaagtgtaccaggtgactcccttgtccccttccccctccactccaggaagcatccgtgtatcccctgctctgctctgaaatagaacatttaatgttcatcatgacggcagtggaagatttggttttgccttttgaattattcctgctcttctgtccctttgtttttgccagcatcttaattcttactaattgatttggtgaggttatttttatgtattcttttaacacagaattattttttgtgtttcagagcagttttatttcaaaggataaaactgtctcttgaaatagtcatgtggtgctttgtctgtaataggttagaatattgccatccatagaagagtaaaaatgactgctgcttttaaataggcttaaattattgactttttatacaaccagcataggcgctgtcattagagcgtcagacctcttatattcagtctgaacatagtccaaatagtcaccatatttattagtttatttgaaccactctcaatttcaccatttgatttgctttcctaataggttctaaactctttgaagctcagttattttgttctgttttctcagcctatgaatttggcctcttgccaagttagttttgattacatttttgctttttcatttatgagctgccataaaagagattgttctgtcttatgctttactaatagttggttaaaggtttgacttaaaagacttggttggcccagagtcatacaagtgcatgtttgccattctgaactgaaatccctggcgacagtgctgtttataaaaggattagagcagggagttttgttgccctaaaatcaggaaaattaagttttattttatattatttaagtaattaaatgataagaaatttacacacaggtgtgtgtgtgtgtccatccttgtgcctcaattacaaaatttcctgaaataatctccctgagctccatcgtggtgtttctcccaccaagcttttcttgtgattctgtcttgcacaccaccgttctttagaagtagtatttcttggaggtttgtgtttgagatggggactggatgctggctgtagcctctttgtggctccaaaggaaagaggagggaggattgtcctcaaagactcttacaagggtagagagggaggaagcaggctgggcaaagctcaaggaagtccatgcaataactgacctgtgtcaggttggggtctccttctagcaggatgtctgtagggggagggaagaaggactgcagggctctctggtgtgccagctgccagctctcatgcagcactcagttttcagtgactctcatgttaattcagcatgccagctgttcaatttaatgtctataccaatggggaatgggagagaggtagataatgaggaaagagaagaaataatgaggtaatatgtcatctcctaaaagctcattttgtaacagaaattgtccagactgttactgcattacattttaggtttttctcaatcccctcagaaaacaaagaagctcatacagaacattgcccctaccactagcaagaggcaaatctttcagccctcccaaggctggctttcaggctcctgaagctgtgccttctgaatgtgacaccttgtcctggcgacatctctggagagacgccacacacatcagtgttaagtggtacacatggtccttttcaccacaaatgtcctgaaatcgagggactatttagaaaacaggcggctgcttcattctattgtgggagtgatgtgacaggaagggaggctcaggaatgaccatgacaggaaagcatgtggagcactcacagtaaagcttcacagaagccctcacggccaggcgcagcagagcacagcgactgcccaaggagctgctgtcctagccaccctcccagtcatcttcaagaagaacaaaagttcactgatcgcctcagttcctttattctcctcttgttcttgaggactgaccaatgggtgtgtgtccctgtttgcctctttgctggggtcacagaggaacccaggagctcacattgagtggcccccagacatgtcactggggccagaaagtgccatgaggatgggggtctacactggggtgtggggtggccatatcttctggccctgacttgaacaatgagtccatgtgtggcctctagtttacataaataaagaatggctgtggctgggcgcggtgactcacgcctgtaaccccagcactttgggaggcccaggcgggtggatcacctgaggtcaggagttcgagaccagcctagccaacatggtgaaaccccatctctaaaaatacaaaaattagctgggtgtggtggcaggtgcctgtaatcccagctactcagggggccaaagcaggagaatcgcttgaactcggaaggcagaagtggcagtgagctgagattgcaccatcacactccagcctggggggaaagagcaagacttcatctctaaaaaaaaaaaaaaaaaaaaaagaatggttgtaatcccagcacttcaggaggccaaggcgggtggaattcaagaccagcctggtcaagatggtgaaaccccgtctctactaaaaatacaaaaattagtcaggcgtggtggtgggtgcctgtaatcccagctacttgggaggctgaggcagagaattgcttgaacccaggagggggaggtttcggtgactgagaccgcaccactacactccagcctgggtgacagagcaagactccatctcaaaaaaaagaatgaggtagacagacttggactcccgtttaactgacaggtttattattctgtacctttacgtgataacacactcctcccccccgtctgttcctagttttgaatgtaaatacagttgtttaaatcgtctgttcctagttttgaatgtaaatacaattgtttaaattcctaagtgacatcttggagaaagagcccaaaaggtctaagtaccatcagctgcagagtcctcacataggctgcctctgtcggcctgggtccaaccaggagagaaaacccacacgctaatttgaacaggaaaggtttaatataaagatagaattactaactctaacaaggttttggagtaataaggaattggctagtaagaggagagaaagcaaaagagtataggaatagccgctgtaaggagcagccacggaccctagagctgagttagagtgccaagggaggagccctactccgtgcccggggtcacactaccagggcatgctgcatgcagaaaagtcgctggcacagattgctggaaatcctcctttccaataccagagaaggctgttcccagtgagttccctcacccaaggtaccccctacatagctgactgccaagggatgggtgctgctggctgcatgcaccatcagggtccaaggcactctgctgtaaaacttttgaggggccagtgccactgaagctggtgctagccaccatgccctgcaggagctagacaccgaagaagccagagtgctgcaggagctttgcccagggagcaggcaggactgggaagcaaacctcttcctcctgcagtgtctctccagcaccctctactgacaaggtctcagtgctgctcatagaggacaaagattcacagaggtagcagtaactgcatcaccagcacctagcaatatcccagtgatgcctcctacaggacacaagggggtctgtctaagtgggtaattgccatatttttatatattattgctagatgtatagaataccactttttgagaagaggtaaggaatggaataaagagcttcctacttagccctgtgaactgctttcaaaaaccatagcttcattccgtgacagagaatggagagctctgtgtggggagagaggaaggttgagcacaggagcctgcagaacaagaggagtgactgaggcccctgggagatgctgctagcctggttgtagctgggcagtgttacatgagcaccagcttacagtggttgacctcctgaccttatactatttccacatcttttttcattgtacttatggcaaaatctaagttatggtagctgaaataatcccttgcctttctgtgtacatttcacaaaatttaaagttaatgaaagaaaagaaacctttttaaattcagcaaaatatacatatatgtgtgtgtgtgtgtgtgtgtgtgtgtgtgtgtgtgtgtgtgtgtgtgtattttagttcctctgcttcatcctggtcagtattttcaaatgctgtttaatgcagtaaaatctacacaaaacatgttctgtgtcaaaaagaaaataacgggcagtgaaagatatgtacatttgaatttgaaaaggttcattgttttcacttgactcaagtgaaatgttttttattctgttctattctgaaattctcatggttttcttttaccttatcattgagggaagtaaaccccgtgttaagcttagtcacaaaataaaaactcccacggacttccctcccagtgtagctgaaggttaatgtccagggagatagccttgactgagtcagaactaaaataagggtgttatttagagccagatactctggtgctacagccactacagccgtgtcaagagctcctgacacactggaggctgtcactggtgatctgggcgttctcctaagtcagcattcctagctaaaaatactgccattctgtattggaaacacagcttcctctaatttgtctgttttgaccagaacacaatgttatctttttaaaaagctgtttaggtgtgagaatgtatgttaatggatcacaatacgaataaaaataaaagaatgaaaagataagtgatttgaaatataaaggaactagtacagagacattttctagttaaagtttctaaatggtcagagaaaaatcacctaacctatgagagaaaattttaagatttttttttttttttgagacagtatctcgctgtgtctcccaggccggaatgcagtggcatgatcacagctcagtcatagctcacaggctcaagcgatcctcctacctcagcctccttagtagcgcctacaggtgcatgccaccgtgcccggctaatttttctatagagatggtgtgtcaccacgttgcccaggctggtctccagctcctgagctcaagtgatcctcctgcctcagcctcccaaagtgctgggattacaggcatgaggcaccatgcccagcccaagaatgtttttaaattgactaaacactgcttatttgagggaccatgggagaaaaaaaaattgtgaggtggcttatagatttcaaactatagtgattctgattgatcgagctgtctttcttgaggaaagttacgccaaaggcaacgagctagactgagctgtctgggtgtctgggtagggacgcagctcaccagggcttgccctctttagatgccctctgcaggcagtctagggacttctctcaagatgtccagtttgattaattgcatgatgacagtgtgcttggtgccatgaggggtataaagattcaacagaggctgggcgtggtggttcacgcctgtaaccccagcactttgggaggccagggcgagcggatcacctgaggtcaggagttcgagaccagcctgtccaacatggtgaaaccccgtctctaccactaaaaatacaaaaattagcctggtgtggtagcacatgcctgtaattccagctactcaggaggctgaggcacgagaatcacttgaacccaggagatcgaggttgcggtgagtcaaaattgcaccactgcactccagcctggcaacagagtgagactctgtctcaagaaaactaagcacaggctgggcacggtggctcacgcctgtaatcccagcacttggagaggccgaggcgggtggatcatgaggtcaggagatcaacaccatcctggctaagatggtgaaaccccgtctctactaaaaacacaaaaaattagccgggcgtgttgataggcacctgtagtcccagctactcgggaggctgaggcaggagaatggtgtgaacccgggaggcggagcctgcagtgagcatggatcgcgctactgcactccagcgtgggtgacagagtgagactccgtctcaaaaaaaaaaaaatgtctacttaagggcctcctggtgttcttaaggagatgaggagcacctttgcgatacagaacacaacattatatccaatgaaaatcttacccactcactgcatgggacacacagtgggtgctatggctgctgaacagaagatcgataaggcctggaatgtcaagaaagcttcctggagaagatcttgagcaggtacttgaggactgggcaggtttctgataagcagaaagttcaggagaaaaaaaagggacagtggtattcatccagaaaatcgtatgtcctttgtatgtttcacccagtgctggaaatgttgatcatcacttttaaagataattctaaagtcaccttgcaacaaccctgcatttatttaagatcatatatcatatatgtgtacatgtttttgttttgtttttttgagactaagtctcgctctatcgcccaggctggagcgcagttgcgccatctcggctcattgcaacctccacctcccgggttcaagtgattctcctgcttcagcctcctgagtagctgggattacaggcacctgccaccacacccggctaatttttgtatttttagtagagacagggtttcaccatgttggtcaggctgatcttgaactcctaacctcatgattcacccactttggcctcccaaagtgctgggattacagacgtgagtcaccgtgcccagccgtgtacatgtattttaaaaagaatagagctcaaaatgttaaagtacttgtttccagttggcaggaatatgcgtgattcttctctgcctttcatacattttctgcaataagctatattgctgttgggctgataaaagttgacaaattcaacttaccaaaccaaaacagtacagttcagtgatcccatcccaaagcacttacacatccatgcgcacgggctcacagaaactgaggcttgccattgttcagtcatttgttagtgttctgcttttaatgattgcacctttttgctgcccattctgttttcccatccagtctcgtgtctttccatgatgggtttcctgtgtgatgggagtgtctccattatcatagggacaggatggcttgttgcagggagtaagagcgtcacaagagtgtctgaggcactcagggagtgtcatggagaaaggagagagtgctgggaggagcttgatttcagtctttctcctttcccttccccaggctccatgtcctttacaaagtcctttgtgggtagatatttgttggttggttcatgttagcaacttttctagagatcatccagggagaggtgcttcttaagaaacaagccaccacataggtcgtcaagacttaaaactggttaggattgagtaactgacctatttatttgcagtactttctgcctgttgtgggcagtgtctctgaggccacacagtgctttcagacctgccttgtgttgcagaaccccatggacactgaggttgagcgtggggccattcctgccttctctgggctgtccctcagtacacctctgcctggggctcctgagtggccactctcttttgcctgtgggctttgggaataaaactaggatagttttccctcagatactagaggaggaattttttattgatacataataattgtacatatttatggggtgcatgtgttattttgctgcatgcatgtaatgcataaggatcaaatcggggtaactagcatatccatcacttcaaacatttatcatttccttgagtttagaactttcacaatcctcttctagctttttgaacatgcgcaataaattattgttaacattagtcaccctacagtgctgaggaacccaagaactattcctgttactcagctgtaatgttgagtcccttaacctctccctctctcccctcccagccacccttcccaccctctaataaccaactctgcgttctaattctgtgagttcaattgtatttttgctttcacatatgagtgagaacatctggcatgtgtctttctgtgcctgacttatttcacttaacataatgtaccccgggctcatcatgatgccaccactgacaggatctaattctttttttgtggctggatgatattccatctgaaacgatgtattttagatgattttaagacttaaatgggtgcctgctagttttcttccagaaatatttcaacctgatatcataatggcatttcactcattttccttttaagggaaataaatacagttaagatatcataaagtttgggatgctagaaacctatctgcaacaccgaagagagtctctaactctttagattaagtttcatttcagagggagtttcttgaagacaattagatgcaaatagccttctcacaattacaacctcattgtaatttctggactttgattccagtgtttgggatggtttgggcccctgggatggggttgatggtgcatagggagagaatttgttttgttcatttcattattgttaggtgataatcttttagtgactcttcagttatttttagcatatgtaacaaagccacggtagctctgccttactttgataataatcccaataagcaatgctaatacaaacatgtaaaaaatgtgctattttctttattttaaactagcttgagaaaatgtacattatttctttatcactgtcttgcttctgtggtaatgaataatttctttttgcctgtgcattcaaaaattaggaaaaaaaattgacaaggcaaaatggcatattaattacaaatccgtatctttttctggccaaactttgtctgttttctcactgtctgttgaaagaaaatccagtgcatttgttctagaagctacaaaatgggaaggaacttcccagtttcattatctttacttgcatgtcatgattgttttgtttttagtagtctgggggaaattagattgtattttccatttgagcaggatagaggatgatagtagaaacagttcattttggcatatgataatttcaccaggccaccccaacagttcaaataccccattatgacctggaagcctttgaatgcagttggagaagcttcatctagtagttgttattgccaagtgctccgtttagccatcagttatgcaaatctatttgtggaatagaatgaagcatttactaagcactccgctttttctatattggagtcctgtattttagaggcaattggttaaaatgtctagtttggcttttaaatcctacagatatttggtaatgatgtacataagtccatcattactacttaagaggagtaattttaagctactagtgttttttttttttttttttttttgagacggagtctcgctctgtcgcccaggctggagtgcagtggcgcgatctcggctcactgcaagctccgcctcccgggttcacgccattctcctgcctcagccccccgagtagctgggactacaggcgcccgctaccacgcccggctaattttttgtatttttcgtagagacggggtttcaccgtgttagccaggatggtctcgatctcctgacctcgtgatccgcccacctcggcctcccaaagtgcagggattacaggcgtgagccaccgcgcccggccgctactagtgttttttaaaagctgctttttaaaaaaatgttggctgctattttcatgactttattcaggccttaattatttgagctgctgaaaatagctataattttttgcatgatatctccaagtagcttatttgtatttggccatggcttatgtcagaggtggagttagttttgactaaaatcatgaagttagcagacagttggaatctgaagctttacagccttctttacaggacactactgtgtgccaactttgcatcactgtgcagtgagtgggggcccttaaccaagctattggactcatgcagccagggtcctagatttgccgcagtaggtcaatcattccataagtgaaacacgcagtagatgatcagaaaatgacaaattcatcaactgttttcataaagtagaaatcactctgctctgggtggatttaaggaacatgtggggttcagacctgtcctgtaggatctcccaaagacccaacttagccatgagggctgattagagtatagaacctcttaagaaacgccctggatttgttggcaagatggcaaataggaacagctccggtctgcagctcccagcaagattggtgcggaaggcaggtgatttctgcatttccacctgaggtactcagttcatctcattgggactggttggacagtgggtgcagcccaaggaggatgagccgaagcagggtggggcgttgcctcacccgggaagcgcaaggggttggggaactccctctcctagccaagggaagccattagggactgtaccatgcaccccggcccagatgttgcacttttcccacggtcttcgcaacccacagaccaggagattccctctgaagcctacaccaccagggccctgggtttccagcacaaaactggcggcctttagggcagacaccgagctagccagtttttttttttcataccccagtggtagcgtttgagtttttttcgtgccccagtggcgccaggaatgccaacaagacagaaacattcactcccctggaaaggagggctgaagccagggagccaagaggtctggcttgatgggtcccacccccacggagccaaacaagctaagatccactggcttgaaattcttgtgctagtatagcagactgagctcgacctgggatgctccagcttggttggggaaggggcgtctgccattgctaaggcttgagtagatggttttaccctcacagtgtaaacaaagccactgggaaattcgaactgggtggagcccactgcatttcagcaaggttgctaccctcagactgcctctctagattccctcctctctgggtagggcatctctgaaaaaaaggcagcaaccccagtcagggacttacagataaaaccgtcacctcccgggacagagcacttaggggaaggggtggttgtgggcacagcttcagctgtccctaactggcagctctgaagagagcagcagatctcccagcacagcgttcaagctctgataagggacagcctgcctcctcaagtgggtccctgacccccatgtatcctaactgggagacacctcctagtaggggccaacagatacctcatacaggagagctctggctggcatctggtgggtgcccctctggaatgaggcatccagaggaaggaacaacagcctgcagcccccgccagtgatacccaggcaaacagggtctggagcggacctccagcaaactccagcagacctgcagcagaggggcctgactgttagaaggaaaactaacaaacagaaaggcatagcatcaacatcaacaaaaatgacgtccactcagagaccccatccgaaggtcaccaacttcaaagaccaaaggtacataaatccacgaagatggggagaaaccagcacaaaaaggctgaaaattccaaaaaccagaacacctcttctcctccaaaggatcacaactccttgccagcaagggagcaaaactggaaggagaatgagtttgacgaatgtgacaggagtaggcttcagaaggtaggtaataacaaactcctccgagctaaaggaacatgtgctaacccaatgcaaggaagttaagaacgctgaaaaaaggttagatgaattgctaactagaataaccagtttagagaagaacataaatggtctgatggagctgaaaaacacagtacaagaacttcatgaagcacacacaagtatcaacagccaagtcgatcaagcagaagaaaggatatcagagattgaagatcaactcaatgaaataaagcgtgaagacaagattagagggaaaaaagtgaaaagaaatgaacaaagcctccaagaaatatgggactatgtgaaaagaccagatctttgtttgattggtatacctgaaagtgacggggagaatggaaccaagttggaaaacattcctcaggatattatctaggagaacttccccaacctagcaaggcaggccaacattcaaattaaggaaatgggacaccagaaagatactccttgagaaaagcaacgccaggacacataattttcagatcaccaaggttgaaatgaaggaaaaaatgttaagggcaaccagagagaaaggttgggttacccataaagggaagcccatcagactaacagcggatctcggcagaaaccctacaagccagaagagagtgggggccaatattcaaaattcttaaaggaaagaattttcaatccagaatttcatatccagccaaacaaagcttcataagcgaaggagaaataaaatccgtcacagacaaggaaatgctgagacagtttgtcaccaccaggcctgcctcacaagaactcctgaaggaagcactaaacatggaaaggaacaaccggtacgagccactgcaaaaacttaccaaattgtaaagactatcaatgctgtgaagaaactgcatcaactaacgggccaaaataacagctagcatcatattggcaggatgaaattcacacataacaatattaaccttaaatgtaaacgggctaaatgccccaattaaaagacacagactggcaaattggatgaagagtcaagacccatcagtgtgctgtattcaggagacccatcccacgtggagagacacacataggctcaaaataaaaggatggaggaaaatttaccaagcaaatggaaagcaaaaaaaaaaaaaacccaggagttgcaatcctagtctctgataaaacagcctttaaactacaaagatcaagagacaaagaagggcattacataatggtagagggatcagtgcaacaagaagagctaactatcctaaatatatatgcacccaatacaggagcacccagattcataacgcatgttcttagagacctacaaagagacttagactcccacacaataatagtgggagactttaacaccccactgtcaatattagatcaatgagacagaaagttaacaaggatatccaggacttgaacttagctctggaccaagcgggcctaatagaactcttcaccacaaatcagcagaatatacactcttctcagcaccacatagcacttattctaaaattgatcacataattggaagtaaaacactcctcagcaaatgcaaaaaaatggaaatcataatggtctctcagaccacagtgcaatcaaagtagaactcaggactaagaaactcactcaaaaccacacaactatgttgaaactgaacaacctgctcctgaatgactactgggtaaataacgaaatgagggcaaaaataaagatgttatttgaaaccaatgagaacaaagacacaacgtaccagaatctctgggacacatttaaagcagtgtgtagagggaaatttatagcactaaatgcccacaagagaaagcaggaaagatctaaaatcgacaccctaacatcacaattaaaagaactggagaagcaagagcaaacaaattcaaaagctagcagaagacaagaagtaactaagatcagagcagaaaaggagatagatacacgaaaaaccctttaaaaaataaatgaatccaggagctggggttttgttttgttttattttgttttgttttgagacggagtctggctctgtcgccaggctggagtgcagtggtgcgatctcggctcactgcaagctccgcctcccgagttcatgccattctcctgcctcagcctcccgaatagctgggactatgagtagctgggactacaggcgcctgccaacacacccggctaattttttgtatttttagtagagacagggtttcaccgcgttagccaggatggtctcgatctcctgatctcgtgatccgcccgcctcggcctcccaaagtgctgggattacaggcgtgagtcaccgcgcccggcccaggagctggttttttgaaaagatcaacaaaatagatagaccactagtgagaataataaagaagaaaagagagaagaatcaaatagatgcaataaaaaatgataaaggggatatcaccactgatcccacaaaaatacagactaccatcagcgaatactgtaaacacctctgcacaaataaaccagaaaatctagaagaaatggataaatcgctggacatgtacaccctcccaagactaaaccaagaagaagtcaaatccctgaatagaccaataacaagttctgaaattgaggcagcaagtaatagcctaccaaccaaaaaaagtccaggactggatggattcacagctgaattctaccagaggtacaaagaggagctggtaccattccttctgaaactattccaaacaatagaaaaaagggactcctccctaactcattttatgaggccagcatcatcctgataccaaaacctggcagagacacaacaaaaaaagaaaatttcaggccaatatccctgatgaacatcaatgcgaaaatcctcaataaaatactagcaaacggaatccagcagcatatcaaaaagcttatccacttcagtcaagtcagcttcatccctgggatacaaggttcattcaacatacgcaaatcaataaacgtaatccatcacataaacagaaccaatgacaaaaaccacatgattatctcaatagatgcacaaaaggcctcgacaaaattcaacagtgcttcatactaaaaactctcaataaactaggcattgatggaatgtatctcaaaataataagagctatttatggcaaacccacagccaatagcatactgaatgggcaaaaactggaagcaatccctttaaaaaaccagcacaagacaaggatgccctctcttaccactcctattcaacatagtattagaagttctggccagggcaatcaggcaagagaaataaataaagggtattcagttaggaaaagagcaagtcaaattgtctctatttgcagatgacatgattgtatgtttagaaaaccccatcgtgtcagcccagaatctccttaagctgataagcaaattcagcaaattctccagatacaaaatcaatgtgcaaaaatcacaggcattcctatacaccaataacagacaaacggagagccaaatcatgagtaaactcccattcacagttgttactaagagaataaaatacctaggaatacaacttacaagggatgtgaaggacctcttcaaggagaactacaaaccactgctcaaggaaataagagaggacacaaacaaatggaaaaatattccatgctcatggataggaagaatcaattttgggctatactgcccaaagtaatttatagattcaatgctgtccccatcaagctactattgactttcttcacagaattggaaaaaactactttgaatttcacatggaaccaaaaaagagcctgcatagccaagacattcctaaccaaaaagaacaaagctggaggcatcacgctacctgacttcaaagtatactacaagtctactttgttactacaaggctgttttgttactacaaaaacagcatggtacttataccaaaacagatatataaaccaatggaacagaacagaagcctcagaaataacgccacacatctacaaccatctgatctttgacaaacctgacaaaaacaagcaatggggaaaggtttccctatttaataaatggtgttgggaaaactggctagccatatgcagaaagctgaaactagatcccttccttacaccttatacaaaaattaactgaagatggattaaagatttaaatgtaagacataaaaccatgaaaaccctagaagaaaacctaggcaataccattcaggacataggcatgggcaaggacttcatgtctaaaacaccaacagcaatggcagcaaaagccaaaactgacaaacaggatctgactaaactaaagagcttctgcatagcagaagaaacaatcatcagagtgaacagacaacctacagaatgggagaaaatttttgcaatctactcatctgacaaagggctaatatccagaatctataaagaactaaaacaaatttacaagaaaaaaaccccatcaaaaagtgggcaaaggatatgaacagacacttctcaaaagaagatatttatgcagccaacagacatgaaaaacagctcatcatcactgatcattagagaaatgcaaatcaaaaccacaatgagataccatctcacaccagttagaatagtgatcattaaaaagtcaggaaacaacagatgctggagtggatgtggagaaataggaacacttttacactgttggtgggagtgtatattagttcaaccattgtggaagacagtgtgccgattcctcaaggatctagaactagaaataccatttgacccagcaatcccattactgggtatatacccaaaggattataaatcattctataaagacacatgcacatgtatgtttgttgcaacactgttcacaatagcaaagacttggaaccacaccagatgcctatcaatcatagactggataaagaaaatgtagcatatatacaccataggatattatgcagccataaaaaaggatgagttcatgtcctttgcagggacatggatgatgctggaaaccatcattctcagcaaactaacacgagaacaaaaaaccaaacactgcatgttctcataagtgggagttgaacagtgagaacacatggacacagggaagggaacatcacacaccggggcctgtcggtgggtgggggataggggagggatagcattagaagaaatacctaatgtagatgacaggttgatgggtgcagcaaaccaccatggcacatgtatacctatgtaacaaacctgcacgttctgcacatgtacctacctcgaacttgaagtataataaaataaatactttcaacagtaaaaaaaagaaaaacgcccttagggaattgaggacctcgcacaatcctaattcttcaccaaaagccacctagcagacctgctattcagacgaatctgacttttttggtattttcaaacaacagcctcccaccctacttcaatggctattctgatgccactgccgtggcagtagtagtttcagtcaaatttgtttgcatttcttagagtgacattattaattcctgaaaatgatttaacagtatcaaaatgcctgaatataaaagttgagctatggtgtttattcggaattaaaccactcccttgtcctcttgaaaaaataacatatttcttttagctttactctgttgtagctaaataagataagtgactgcaggtagtctttttgggagaattgtgtgccgcctaaactttcttttcttttcttttctttttttttttctttcgagacggagttttgctcttgttgcccaggcttgagtgcagttgcacaatctcggctcactgcagcctctgcctcctaggttcaggcgattctcctgcctcagcctcctgagcagctgggattacacgtgcccaccaccacgccagctaatgttttgtgtttttagtagagacagggtttcatcatgttggccaggctcctggccaaatctcaaactcctgacctcaggtgatccacccgcctcggcctcccaaagtgcagggattacaggcgtgagccactgcacctgaccaccacctaaacattccatggccacactgttacagatccttattcacgacatacaaacaaccttgttcactcagcactgggcaccaaactatgtactgtatagtcatagaagcagaggctatgacttttatttatttattcattcattcattcattcagcagattgtagtatcttctactgatggtgggctggatacttcttaggcaccacattgggcctattgcatcatgggctcatagtaaaagttccatatgtccaggaatgatgtaaagccaacaatggaataatgcgagcaactatttttctagaagaagtagactttaccagaatgccaaaatgggctgctaaaggaagggcagcccatcagtgctgtcaccagctcctgaaaccccggggcctgtttactcccaccattgcagtggaggacatgtctgagcctcctgcttgtctttaacccccacattagttcctttgtcgtttcagtgtaagtagcttgggtaatgtgcagagaatttctttgccttgtattatttatgctgagaatcaactggttgggtcatcagttcctagggagaggctaatgggaaggtgatctatagagtgtgatagaagacaatctagctttcttgctgcatcttttcttcgttcagaacgtcagcttctcttttccctcccaactcccagcaggatattcctgattgaaagaaaggccaagaggagagaatgagatctagcaaaattgtaaacaaaggaacagagccacaaacctgttttacattcatataaaatgttacattgattgattaaacagtttaaaaatatcttcatagtatatggtacctttgatcataaaaccaggtcatgttaaggtgacctctattgaagagttctatttagggttactgtgtgccaaccaccctcattaaaatagtcacagatgtaagtagaggaaaccagataaaaggaaagatctctatctgcttccccgtagtaatccttacatagcataacttgagttaagaacagccagatggaagagataatggggcaaggtgtggggaaacagagcagagcttctctcctctgggagcgccaccctcccagcacctccatatgttcagcaacccagaagttcccctaaactgtcctattgagtttttatggaggcttcttttcataggcatgattgatttgatcattgaccacaactcctctcccttccaaggggttggggctggagctgaaagttgcagccttcttattgcatggttgattctccagcagccacccccacacctgtcacattagcctacaaaagacacttaccacttcagagagtccaagagttttaggagtcctgtgccaggaaatgggggcggagaccaagaatagatttattattaaaagtcacaatatgacaggcagtttctttaaaacctaagcattcacttaccatacaactcagcaattttactgttgggcatttatcccagagaaataaaaatatattcaatacagaaatttctatagtttcattcacagtgccacaaattggaaggaaagtacttaaatgcccttcagcgggtgaacagtgaaacaaactatgcatccatgtcatggaatactacgtggcagtaaacaagagcaaactggacatgtggagcaacttggattgatctcagggcattgtgctgaatgaaaagccttaagatgtcacatgaacgattccatttggtaacattctttaaataacagaatcatataaatgaaaaacacatgagtggttgccagaggttaggagtgttggagtgtgcagaggtatgtgatggtcagagataacatgaaagagaagtctgtggtgatggaatagtcctgtaacttgatagaggctgttgttacaggaagctgcccatgtgatgaaatgacagacacccgcacacatgcattgttgcaatgtcaggttcctggttttgctcctgtactgtagtcacgtaagatgtgagcactggggagactgtgagggagaattctgagcagaaggctcacgtggcttcctgcctcctaccatgccacccccaccggatgcattaaatttctggtctgagtcagcctgcctctgtccccatccatctgtctgtctgtctctttctttccctccctccctgcctcctcactgtttcacatggtcattgtaaaaaagaaacctaaaaaattaggaaatgtagataaattgaaaggaaaaattttaaaccatgaggttgttcctttcttatttaaatatggtggttcccttgtttcatcagccataggctttgggcctgggcaggatctgtagcccacagcctttgagttcttgacctatcctctgagatttttaggattcaaagtagaaagacttggtcccctgcttccagtcctatctggtacccactccctcatcttttctggctaaccattgtgcttcccagtaattatgtttaacattttctcacatagggattaacaacataggctctggactcagagtgcctaggtttaaatcttgactccaccacctccttagtagttattcagtctctttgtgcctcagtttcttcatttgtaactaacacctatctcagaagccgtgggaaggattaagggatgtgataggaagcactcactgactcttggatatcattatttatggttgttacttggtgtctctggctgcattttgtttgtcgctgctggttccgtgactgtccatcagtgtgccttgcgcctgttctgtagattttatttcacagtctcttggttttggtgggtggcacactgccctgagaggacggggacgtgagaaagattctgagccctttagttgtctctagtgctacatcatgattgtcatcattgctgtaaaccaaaaagtatatgagacaagtcttactcaatttagaacatgtattttgccaaagttaatgacgcacccatgacacagcctcaggaggtcctgacaacatgcgccccggggtggtcggggtacagcttgcttttatacatttcagggagacatgagacatcaatcaatatatgtaagatgtacattggttcagtccagtaaggtggaacaattcgaagtagggggtttccaggccagaagtagataagagacaaaaagttgcattcttttgagtccttgatcagccttccgatgaatacacaattgtgtctggctcagtgaacctacatttttacgtgaacaatagggcagaggaagcaatcagttatgcatttgtctcaggtgagcctcaaagggatgactttgagttgtgtctgtcctttttccataaggagttttcttgcgggcaaatggtgagggagggatgtaggttgttatctttgtagctatcttatttagcaataaaacaggaggcaagtttgcctgacgtagtttccagcttgactttttccttggcttagtgatttagtttcctttcgcattgctaactcaatcacaggagacaggagtgtggactgaatatagcaagaatgccaaagtatgtaacagtttccttagtcatgatagagactgagaaacatcggctcacctaagctttgaggttagctggagtccagtagaagagttataactaaacactggcccttgtctgtttccacttgtgcccattcattgaagctgagattggactgagtacatttgtgactatgtaccagtagcaaaggtgatagaagtcaaacgtagctcttagttttaggggctcatggcctcctggggaagggacccatcaggcatagctggcagtcatggccagggttgtggaagcccaggtccaggcagggttcaaatgctcctcagagtgtgccagcagcctcagcctcagggagagcttgtcagggggatgttttacaaggtctccaaaagcctcttatgccctccagagtgaaaagcacggcattgttgatgaagtcttgtggcaaatatgcaaggcacgtgtggatatttctttctcttggaggcttacaaggtagccccggtctcctggtgcagtgtttatagcatagtccactgggactgccgctctgacaaagactgtgtcactactttgtggaatgttattttagaacttccagaatgcctcagtaaatcctgactgccatgtaactgtgtactgtgctgctgagctcttaacatgaagcagcagcagtgaccctggcgggccaggctgacgtgcgtgggaacagtgggagtgaccctggctgggaagcagggaggcctggatattgtttctcctggctctgtgtcctgccattctcatccctgtgctcagagctctcaagcacccacgatggccttctcaggccgagcgcgcccctgcattatcccagagaacgaagaaatcccccgagcagcccttaacactgtccacgaggccaatgggaccgaggacgagagggctgtttccaaactgcagcgcaggcacagtgacgtgaaagtctacaaggagttctgtgacttttatgcgaaattgtgagtgtctcctctcctggagtgccctcttccaggtccagcgttcttggctgtctgttcaggagccatcctgagctggcccatacaattttattgactggactttgggtgggagttttccagggtggtagggctccgaggggctcgcagcgcagcatgtttagggagacaggagactgccttgtcggtaagacatgcagcgacacgcagatgggagggaggtgctgccctcactgtgagagcatggcggccccgtcttcagtaggttcctgatcacttggtaactaactgcattttcatcatgtcgtccgcaagggaggcttagtgttgtcattgtcagtaattacgttagaaaaattctgcagtctaaaacggcccaaagataaggggcagatgggttgggacagtgaaaaaaacaaattacagactgttggtaaagataaatatttttgttttgtgtaataatcaacaatttgaagtaagctaactgggtttcttaattgaatgaataaatatatatatcgtataagtagcagctcaatacacatatagaacatactgttaactctaaaaagctaggctaatttatattattaaataggttttagcaaacacatttttttaagaaaatgcagagtagccatcagaccagctcaagattattgacctcattcaaagttgtgagcttagaattactgcgtatcccaaatttgtcaagtaagagttaatgagaatttaactgacccggttctctacttccataatccgtgctctgtggtacagatgtcacttatcttcacaactcacagagagctctgtttgacagtaactggggaattgtaataatacagtaaccaatattttgactgcttggtgaactctcaagaagatttttggatttatacattgctgcattttaggaccaaacaatttgttttgcatacttgaataatggaaagcaagatatcagttgtgctgtgtgaggttgatttgtggaagtggatcagcttcatcagtcatgcctggcctgacttttacatataaatatctatctatctatcgatagatagatagatagatagatagatagatagatactcccccacttacatatttcttgtcatcaacactttttagtgaaaatctttttctaaaaaattagctaattaattataactaatctgatggtagctataactgtcactaatgacttttttaaagtaatttctgtcatctgtagtattaaatataaaatcaacatttaaaaaaaaaacaacaacaggcattgtgccagagggtcaaaggcaaaagaggaaagggaagcctgactggttcagggggcagcaaggtgattgttctgtttcctttttccccctgcttgtgatgaaaaggaatacttcttgcaaaatatatattatattacctctaaaactagcggatttttcctgtgtgtgggaagtaactgtgtgcttgtttttatgatgtatctacctatttcctaattctacttgagtatttgaacttaagtagaaacaatctatattataatgagtttaaactggtcagtgataatcaaacgttttaatctaagggcctcttaacactcttaaaaactattaaggttcccaaaggactttcatttatcagtatttaccatatgagaaattgaaactgggaacaatttaaaatacttattaattcatttaaaaacaacactaagcttattacgtgttaataatagtaaatgttaatattaatgttgtcatgaaaaataactgttttccaaaatggaagaggcttagaggaaaggatggcattgcgttacatttttgcaaatcttgttaataaaagtttctcagatttgtttctgcattcaacctattacagtctattgttttagatgaaatatatgaagaaaacatggcctcccacagagatgtagttggaaaagaggacttttctgcctcctgaaagggtcatggtgacgctgacattttgaaaacgactgatttaggtgataatgatccaggacattctagaatattctttttgggcttttttagagtcccattaagattgttgaggtttggtgaatcttttgagagggtttagaattaacaacagagccatatatatgagcagcatcttacggtttccaaatagtttaaaatactttttcctcagaacaataatgagaacagcactgagaatgaccaggcagatgtggagcttaccgtgctccttcatccaggaatacctgtggactttggtcagaaagagggaagaagcacaaacccctccagagttttgtaaaactgccacaatcatctggcttacggcaaagctgggcgatgatgagaattttacagattttttccccaacctacagtaactttgaaatgacagaatggaaattcattttaacatgaggcttgggccaggtttactgagcagtgaagctgcttccctttctcccttccttccttttttttgtgacattttaattctgcattcaaacctgttaaataaagttgagctttgacgggtctgaagtgatgaacatggtgtgtctgcacgcagttatttatggcaaggctacaaaacaggatgactgttttgtgaaacattttggggagaaaggcaaagggaaagttgtcttccagaggtgtggaggggagtgaagcaagtaagtggaaccacttttgctaaggaaacagcaaaacttggaaaccaataggggcaaggcagttagttactctgtttatagaatggagactgtctacctgtctgtctcactagttggttgtgaaaattcaggagaacattggtaataacttcatgaagtacattgattaaatatctggaaggtcagaagctgtaccagggaactagacacacaggtgtagagctcatgctgtgggtaggcctgtgaaaataaacttgccaaaaattgaaggaccgcttggcatgggggaccttctccatttctaggacttttaagaaataaataggtcttcacgtgaaatcctcatctaattgtatgcctgtcaaagccatgttgcttttcttttcctttttcttttttgaaatggagttttgttcttgttgtccaggctggagtgcagtggcgagatcttggctcactgcaacctccgcctcccaggttcaagtgattctcctgcctcagcctcccaagtagctgggactacaggcatgtgccaccacacccggctaattttgaatttttactagagacgaggttttaccatgttggtcaggctggtctcgaactcctgacctcaagtaatccactgtcctcagcctcccaaagtcctgggattacaggcgtgagccactgcagccatctgccatgttgctttccttcttccaaactgcacagtggttagagcctgagattatttattgaatgccttctgtgttttaaggtgtagtgaggctaccgatgggggaatttcccacgtcaccagccgcagcagtggttacttgacaacttggtgtcactttcctaacctatgaaacgtggtggtatccctgtcatgtcctttcaagtgtttgaaattcgtggtgtaatctgttttgattgacagtgtgattttatgagcaggggacctggatttctagtcctgcaccttcctttaactaattagccttgtgatgttggtctgatccttccatctctgtgaacctgttttgccatctgtaaaatgatctttattatgtaaaattctgtgattttaagatacattttataatattggtaatcaggttcgtcttaccgattaggtaacaggactggggcatcttggctggttttaaggctacttaagcagttgttttccacaggatttaatcaaagggataacccgtgtctaggttatatgacatggcatttagttgacatgcattttagattctgttctcagaagggaaagaaactggccttgagatgttgacttttggatattttaattaagctacttattaagctataaacccaattccttgagagcagcttgtaactttcatctctgtctcaggtgcctaacacatagtaggcactcactcatagtatattcagcaagaagaatgccaaaaatgttagaaacagaatcaaagtgggacacccttacagagcctcagatgctacggtaaagaggctgaagtgtccgagttcagagcatgtaaggaacaagcaagaaattgagctttttagataaaatagggtttttgtgatcagatagaatttgctgctcggttcttagtgttgtttgatcttcgatctaagaagtggctgacggtctgcaacctgctgttctttgcgtgttacagcaacatggccaacgccctggccagcgccacttgcgagcgctgcaagggcggctttgcgcccgctgagaagatcgtgaacagtaatggggagctgtaccatgagcagtgtttcgtgtgcgctcagtgcttccagcagttcccagaaggactcttctatgaggtgagttgcactggacaaaagcagggaggtgccattccccgccctcccgcttcctgcccttctttcctgaggcctcctccttcatgttcagtttcatgatgaaagactgaagtgccacatgcatgccaggtatttgatagctgtgaggtcagaggtggcatctctatggcccatatgggcagtggcgtgattgggacaccctcacagaccctgcatttgtattgctcagttcatcgtcctatttcagaacccagagtcccttatgacagagcctttcagacctaagcagctcagctccacatagaaaattctttccgagtcttcagccacactcaggccccccacacacctcacccactcctgtctctgtgtctttcccccttctcagaggaccactggacctgctctaaaggagagcgtgcggtgtacgtcaccccctccacaacttcccagcctcgagccaggagcgtccatgcatttattttctaagggaaaaaaaaataagtattttagggaactatactgtctacatttagctctcctgggtgtctatgttcttttctaaatatttgtttttcttgatcctcgggtgttagcatatggtctgcacttcctttgtagtgtatttggtattctcaacattaccgaaaccactttcttgttgttttttattgttttgttttgtttgagacaaagtctcattgtatagcccaggctagagtgtagtggcatgattatagctcattgcagccttgaactgctaagctcaagtgatcctccagcctcagcctcctgagtagctggggctacaggcacgtgccaccatgcccgactaattttatttttcatagaaacggagtctccctatgttgcccaggctggtctcaaactcctgggctcaggtgatcctcggcctcccaaagtgctaggattacaggcatgaacctccatgtctggcccactgaaactcctgtctcacagtaaacatgtattttgggggataatctagagatgctgaccccaggctataaatgacggtgagagtgaggtgtatgtgtgtgttagatcaaataggtaatttacttttaccaccttacttcttacatatttgtacgtaaatgcacatctatatatgataatatatgtatatagaattattttatagctggagatggctgctctttgatttcttcttttgcctagcagatttttatgtttccctgttatataaaccatgcttgagcaaggaaaggtagttgacaaagatcattggtaagtccattgtatgccactccggcagcattttcccatagaaacaaacatgagagtggggttcccaggccagcccacagaaaagctgtttaccccatcatgggtacatgaaatacagggctagcaagtatgtaataatgtcaacttggaaacagctttaagggtttgggttaaggaatgctattttattcactagcacacatttttttaagctcctattgtgtccccaaaacacacattcccaacaacaaaaaccttagcagtggaaagaggttttcgttttctcttttcttctagttctttttttttttttttaagtttatttctttaggcctccaaacatgctctatgtatcttcttacagttcttcctgttcttcctgactccttccctgggcagtgggaatcttttggacaaggatgatggatttagggatgggcaaatgacagttgtgaagatggacaggagcaggagaggccaatgtaccacagcagaagagggcaggagaggagctccagaggtgtgaatggaggcatcaggcatagagaccccctaccgaggctataggtagactgtgattagctggtgaggagaaggaataggaaatccctaggtgctgcggcagcaagaagagagggcgtttgctggtggtagtggtggtgagccatgactcaattcagttaaagggacctgaggacctgcttctacctcggcaccgtggaggcctggtgggactatggcaaggaaggaggtgagactcccaaggcacattgaagggaattctggaaagctggcttggagagagcatggtcttctcactatatgaatcccttctgtatccctcccttcttttttttctctcctgtagtccagagaggttgaaatgtctgataacatagcaggtttgcgacatgaaagagatgagaacctagctggtctcctagtatccaatacaatattctttcccttacatattctttttaaatataagatatttttattgaaatgggtgattatgacaaaggccttaggagagctcggtccaggggagcaatagagaagaactcagagaaaaagacaggctttgttttcccaaacattttccttatatccctggcttgctctttcccctgtgagcaccctggagctccagccctccgtcaccttctttctcccattttgcctgtgacttaggaacgaacatgatggttaagctaccttcattaagcagcatgaccgcttcctgagctcctgctgccgcatttaggccctgtcagctgtgaggccactggtgctgagtcagagggaaaagctcagaacagccttgagcagcgaagaataaagtgtgactcatctcgtcctgcccacccctcacactggactataaataccctccctgggtctgtgtgctgttattccaaaagatgcgatgaatacccagaactaggctattcatgggctgttgcccagttcaagctctattgggtcctgaggaagattactattttggctacattgtttatcattaaaaccagcccagggatgtgtaaacctgcatctggagaataagacatttctttttggttaaatgatattagagaaaaaaaaactatccaaggctgctaacaaataatcttcactttcagttatatccagcaataagttgttctccagaaaagaaagcttggaaacttacccagtttgccttccatttgggacatgactgatgtgcttcagtctttgtataataaatgcatcttcgccactctatatctttgttattgcttttgtctcgttatcacaacaacttccttccctgatttccacagcctctattttttcttttctctagaagactagttagggagacttagaaatggggtctgtgcactcgcttccccttgaaaatgtgatttacttttatggtataactttctggtactttgaattaaataggacattctcttccctttggccacagaggcaagtatagaatgagatccttgtttcctaaccacttaccagaacatatatctgaagaaatgagcaccagtatttctgtctcaactacagtttctcttttttttttctttcttttctttttcttaaaacagggtcttaccgtgttacccaggctggagtgcagtggcacaatcatggctcactgcagccttgacttcctgggctcaagcaatcctcccacctcagcctccctagtagctaggactacaggcacacaccaccacagccagataattaaaaaaattttttttgcagaaacagggtcttgccctgttgcccaggctggtctcgaactcctgagctcaagtgattagatgccatttccccagggaaataccctttcaacccagaggccctaacgctaactatagtggttcctaaatctttgtgacatccagcattatctccagtaaaagaagtattttaatttttcccataagaaaatacttttgggagtgaagtggagccaacagttacaagagtgatttaagtccaggaagtactgcagagtgggatggactgaaccaaggactagggacctggtgtgcagctgattaaccctgacttagtacatgctcagggctgggttctttgttggtgcttcacatttctctctccttagtttggatttcacaaatgtgtcccttttttcccatcacaaaatgcattaacagtaaagacccatttttttaattttttatttttatttttattttttttgagacagagtttcactcttgttgcccaggatggagtgcaaatgtgcgatcttggctcaccgcaacctccaccttgcggcctcgagtgcttctcctgcctgaggctcccaagtagctgggattacaggcaggcgccaccatgcccagctaattttgcatttttattagagacggggtttctccatgttggtcaggctggtctcaaactcccgacctcaggtgatccgctcgcctcgttctcccaaagtgctgggattacaggagtgagccactatgcctggccaggaaagacccgtttatgatgagtagtcttgtagcaagatgttttacaaagaggtttcttcactcatttactctgattattcaggaaggcagaaactgaaatggaagacccttccaaccagcacatctgtttatctgtggatccactcacttcaaggcagtttatgacaaaccagtataaagtaccaaaggaagatttgcaactttgcacttgactggaaatgagactttcagctggtttccggttctgagcttacttgaaagcagctcagaataattgtttcttcccctaaagggaatatttacaaaactccaaaacttaaaacagttagagccattcttggagctcatcttcccccacacagagcgacccatttccacaagcggtgggaccccagggttcttaaggcattttgtttataaacaatttggaccatactaatttggaccattaatatttctaacaggcttattgtattcgttgtttaaatcagtttggggatgtaatgtgtagttacctagaaaggctatatttatagaaatttaaatcttcccaatttatgattcttgatttttaaaaaattttatatcatagagttttactttggatcaacttctggcctttctctcaggctcaaaagttgagctatactatgtttgatcatttctacacactgtagaaaagaggcagctcattatagcagaagttctccacctggaattaacaatagttgtgacactggagaagcatagcccagagtgcaagagatttgcaggatgaatggtggcaaggaaatctatttctaagtcctcctattctggttttgaaggactcaatttctggatccttttctctttgcctgaaaacatatttatattcacaatagtacttctctcacattgcaaaagaaagaaatctcaaatcttactatcattaattgctccaggatacccatcaaaaaggattagttagggagtgctgaaacccataaggcttagtctttccctgccttatgtattttctcgttaaggagaagcttggctttaggaactgtgttggatattctgtattcaggtacagatatgcacgccccttaaccacagggaaatgtctgagaaaggtgtcattaggcaagatcattgttgtgcaaacatcagagaatgtatttaacaaacctaaatgtcatagcctacaacacatctagtctatatggtatggcctgtccctcctaggctacaaacctgtacagcatgttactatacagaatactgcaggcagttgtaacacaatggtgagtattgtgtatctaaaagtatccaagcagaaaaagtacagtaaatataccatataccatggtagtatatatggtccattgttgacagaaatgttatctggcagatgactgcatatgctgaatttagagacgtaggcagtagttacaacagctttcctttttaatttatttttattttttatttatttattttttttgagacagagtttcgctctgtcacccaggctggagtgcagtggtgtgatcttggctcactgcaacctccgcctcctggattcaagcgattctcctgcctcagcctcctcagtagctaggaatccaggcgcatgccaccacgtctggctaatttttgtatttttagtagagacaggtttcaccatgttggtcaggctggtatcgaactcctgatctcattatctgcccacctcggccttccaaagtgctgagattacaggcatgagccactgcacccagccaacagctttccttttaggacttagcctttttcatcccctgactaatttcagaagaatttatccattttaagggaaagctctgggagagcaaagcaaagagcgttggtaagaaattgtgaatgaggtggatagaaaacacaaaccattttccctctgcttgcacaccacaacaatcaacacaagttcttctgtgaccaaacgtgtgggaacttttcaccacacgccaagcaagcaatcagttctgcagtggacaccagctgggcgttctccaattcaattcccacactatctacctggagaccacagattgaggggcagcgccaggactgtcttctccttctgatgccaattgaaagccccagattgcttcacctgtccttctggctgacatgctctgtaaattgggaatcccacagcctcctcttctggttctattaatttgctagagcaactcacagagctcagggaaacacttttactggtttattattagtattatgtttatttgtttgttttgagacaaagtcaagctctgtcacctaaactggagtgcagtggaacaatcacagttcactgcagtctccatctcgtggactcaggcagtcttcctgcctcagcctccccagtagctgggactataggcacatgctaccatgcctggctctaccagtttattctaaacaatattaccagccaggcacggtagagcacacctgtaatcctagcactttgagagactcaggtgggaggattgcttgaagccaggagttcaagagcagcctggacaacatagtgagatcctgtctctacaaaaaataacaaaattagccaggcatgatggcacacacagtcccagctacttgggaggctgaggtgggaagatcatttgagcctaggagttggaggctacagtgagctataatcatgccactgcactccagcctgaaaaaacagggcaagaccgtttctgaaaaaaaaaaaaaaataataataataaaataaatttttaaaaaggatattacaaaggatacagctgaagagatacgtagggtgaggtatacaggggaaggtgttcagagcttccacaccttctctggctgcaccaccctctgggaaactacactgtgttcagctatccagaagctgtctgcaccctgtccttttaaatttttacggaggcttcattatgtaggcatgatgaattaaacacttggccactggtgatcaacttaaccttcagctcctctctgcctttcctgaaggctggagggtggggctgaaaaccccaaccatccgattctgccttggtctttctggtaaccagtcccatcctaaatctacctaggggctgccagtcaggaggcacctcattaacatatacagagacatcacttttaagattccaaggattttaggagctgtatgccaagaaactgggaggaagaccaaatatgtatttcacaatgtcacagtgagggtatgccatgagctagaacaaacagaccaaagcagtattgctttttgactcttgggaggccctagaggttaagcaacttgcccaagaccacacaatgagtctttcagccagattttgaacacaggcagtctggatccatggtcagtgttcttgactcctacttgtcttgttaaaagatgtttccaaattatagttaatcctaattttattttatgtatacagtgattatattttcaaccttctaaaaaaaattatatatatatatatactactgggctactttttagtgtttttatgcaatatacatctttctctttcatttaatacagaataaaagttgatcatttctatctaaattaatggagttatttatgagtttttacacagtcgtcttatggtatccacagaggattggttccaggacaccccctccaccccactcccacctcaccctcagagcttaccaaaatctttgaatgctcaagtccctgatataaaatggtatacttacttgcatataacctatgcacatcctcctgtatatttttcattatctctagattacttacaatagctaataaaatgtaaatgctatgtacatagttgttatactgtgtttttaaatttgtattatttttatttttctattggttttttttattgtttggggttttttcttccacatatttttttatccttggttgatcgaatccaaggatgcagacccagcagatacagaaggctgttttgtggtcattttgtttttttgtttctaattgacataataattacacacatggggcacagtgtgatgtttcaatacatgtatacattgtgtaaaaatcaaatcagggtatttaacgtatccatcaccttgtacatttataatttctttgtcgtaagaacattcaaaatatcccttttctagctattttgaaatagctattttgaaatattttgaaatgcaatatattattaaccaaagtcactctactgtgcaatagaacactagaacttattcgtcctaactgtaactttgtacccattgaccatcttctccccatcccctccactccattctccccagcctccagcaacctctattttactctctatttctatgaaatcaacctctttagattccacatatgagtgagatcatgtagtatttgtccttctgtgcttatttcacttaatgtaatgtcctacaggttcatccatgtcgccacagatgacaggatctcattcttttttatggccaaagagtactccgctgggtatatgtaccatatttttttaatccattcatccgctgatggaaagttaggttgcttccaaatcttggctgttgtgaatagtgctgcagtaaacatgagagtgcagatatctcttccacatactgattccatttcctttggatatattcccagtagtgagattgctggatcatatggtagttccattaattactgctaaaagctaaacatcagatttttatacatatagatggcatacattcatcagaaatatatcgtgcttcataaatacttgtacttttggctgcacattataatgtagtatggcatagtatcgagtaatagcatatcaatttattctcttctgttaataaactttaaaaaccaaatacattaatctgggcaaggtagtgtgtgcctgtaatcccagctactcaagaggctgatgtagaaggatcacttgagcccaagcgttcaagacaagcctgaacaacatagcaagaactagtctaaaaacaaaaagatacattaaatatattacagcttattcatttgaattaaaaagtgaaagctggacatagtagctcacacctgtaatcccagcactttgggaggccaaaggcgggaggatcacttgaggtcaggagttcgagaccagcctggccaacatggtgaaaccccatctctactaagaatacaaaaattagctggacatggtggtgggcgcctgtaatcccagctactcaggaggctgaggcaggagaatcgcctgaacccaagaggcagaggttacagtgagccaagattgtaccactgcactccagactgggcaacagagcgagactctgggaaaaaaaaaaaagttattttttctaggagaaaatctgctttggttggttcaacagtaagaactgactttgccagttaagctgtggtagatatgttcactaaattggatgcactaaatctatagccataatttgaggaaattgagttgacaactgatacattaaaaatggatatcattaaaaatggattttaataatcaaacagtgtatgacttttggcatataacttgtaaggagctcaaagactcaaggggagacattactataacatttctcacaagttagtaatgtgaaaagggcttcttagcatttctatattaaaaaaaaaagcaacacccaaaatagaaaatagacctagaattaatattgaacctgagtcttctagtggaaagccatattgatgcatgagatacatgaaataattgtgggaggaaagggcagccctactcatttcactatcactaagatatgcttttcaagtaaacagatagtataaaaaaattaatgtttatgtcttgcttgtcctatactaatcattctaatgataatacagaagaaaataaatgttaacctttacagccttatggattcagaaagcacattttaaaatttcatgttatatatattttttaattgcagaaaagtatgatagggtgatcagttaaagacaagtacaaaaatatactaggataaaattggagcacataaaatgaaaacattcaagaaatgaaagatgtaaaaatcttggctgttaagagaatgttttttaatggattttggtcattttaaaatgtgctaaggctgagcgtactggctaacgcctgtggtcccagtgctttgagagactgaggtgggaggattgctttgggccaggagtccaagaactagcctaggcaacatagcaagactcccatttaaaaaaataataaaatacaatgtgctagaatatttgccctttgtaaatatttgaggttacagtgagaattacagatatcgacctgaaaaatgtgggaggagagttgtatgtatgtgcatattttctggagggagaggtgatccatagctttcatcagattcattaaaggcagggtatttgagccagaaaacaattcagcacagtcagaggccaggtcaccagtccctgtaggtgtactgttcactctagcctctacttattccatatgtctttcctgtaccaacatgtagatgtatggatggtgcaaaagagtatctgctttttaaaatcccagtagagttataaattcttagagtagaactcttagtttagaaacatctttcctgtatatcttcatcaaataattatatttctcctgtgattgtttcgtgtctgtaagttggtggtaccctctctttcagtttgaaggaagaaagtactgtgaacatgactttcagatgctctttgccccttgctgtcatcagtgtggtaagttttactgctaaatgtcaagtaaaaagtaagtttccggccaggcgcggtggctcacacctgtaatcctagcactttgggaggcggagggaggaggatcacctgaggtcaggaattcgagaccagcctggccaacgtagggaaaccccgtctctactaaaaatacaaaaattaactgggcatggtggcaggtgccagtaatcccagttattcaagaggctgaggcaggagaatcgcttgaacccagggggcagaggttgcagtgagctgagattgcaccacttcactccagcctgggcaacagccaaactccatcttgcggggaaaaaaagtaagtttccacattacttcagtcatttcacactggtgaagtatcgatggtaaaaatggtttttagtgctcattatgaataactgttggatacttcatcactcctcttccctattgttaacatagaacaagctggaggagtatcaaaacctagagatcattgatttttaaggacatttaaggtagaggtattttgggatgaactaggactcctatcgggtggtgtttgggagtgttcttttcctgtgttaacacaacctttacctacttgcttttggttttgcccggaaagaggcagggaagaaatcagtgaggtgcttcagaagcttagggatgcttaaacattgcttgcacggcgcataagtgatggacttgcttgcacgttggccacttcactggttgctaatacctctgccaggtttccagagattgaagaaactgggtagaatgttctaaaggtttaatgaaagaataaattaagtatgggttataagaaactgtgctgtagatttcagttgtctatgttgacaatgaccagaaataaccaaaaggcattcaagagagcctagtagctcatttggaaaggaaagctagattcagagatgacacaaaacagcccaaaaatgtggctgctgaatcaaaaacaaaaattcagatgaaataaaaacttttttgctaatgtgcttactctggtagacacataaaaaaagttcttctactggccacgtgtggtggctcacgcctataatcctagcactttgggaggccaagacgggcggatcacctgaggtcgggaattcgaccaacatggagaaaccccgtctctactgaaaatacaaaattagccgggcgtggtggcaggagcctgtaatcccagctacttgggaggctgaggcaggagaatcgcttgaacccgggaggcagaggttgcagtgagtcgagatggtgccattgcactccagcctggacaacaagagcgaaactgtctcaaaaaaaaaaaaaaaaaaaaaagttcctctattgagaaaggcttcaacggtttttttcctcattgtttttccttaattactctctcagtaaataaagtgccatgcctgttacttaggatgttacttagtaacatcctttgtgtgttgctttcccacaggtgaattcatcattggccgagttatcaaagccatgaataacagctggcatccggagtgcttccgctgtgacctctgccaggaagttctggcagatatcgggtttgtcaagaatgctgggaggtaggtggattttcatccttgtcagatgtgggtggacaatgtgactgtgacaagatcatgtgtattctccatgtgggatgtaaggcagttctgtaggacactgaattgagggcatgggaactcagacactgcagtgtgttgactgagtgctgctgctgggagtggacccttgtgttgctgttcacagggcataactgctccatgcatggctgaactaccaatgggggatgtacctagatggagtttcttaaaaatcagtcatattagggttggaacacatttttcatgtggcttgattctgccccgtgaagcacaggagtgatttttttaagaaatggtttgtttaatttcttttcagagataagggaagcatatttctttttaaccattagaaagaacctaaaattttaaatttaagttttgactctgtttagacacctgtgtcgcccctgtcataatcgtgagaaagccagaggccttgggaaatacatctgccagaaatgccatgctatcatcgatgagcagcctctgatattcaagaacgacccctaccatccagaccatttcaactgcgccaactgcgggtactggaattgtttcttttttattacacaagcagtgggaatgaaagattacatttatctatatttctgttactctagcaaaccaaattgtttttctcccatttttagtctagaaaattttaaacctatagaagagtcaggagaatgatataatgaaacctgtatacccttaatttcatttcaccagttgacattttgccatgcttgtgtgtatacagtccacattctcgtttcaccctcctatgtatgtgtgcacatgtgcctgtatacgcatacctctaaaatttctcatgactcccagtatgcatctcctgagaataagggcattttcctatggaaccatgatacattttgtaaattttttttttccttgagacagggtctcgctctattgcccaggctgaagtgcagtgggcaatcatagctcactgcagcctcaccctcctgggctcaagcagtccccccacttcagcctccagagtagctgagaccacaggcacacaccacccttcctaatttttttaaattttttgtagagatggagccttgctgcgttgcccaggctggtctcaaactcctgggctcaagcaatctactcatctcggcctcccaaagtgctgggactataggcatgagccactgcacctggccagaaccacaatactcttattatgcctaagaaaattagcaataatcttataatatcaactatcagtccatattaaaaatattcccagtagccccagaaatatttgtcatcactatgtttttccaatcgaagatctaaaaacaaaaaaaggtcttatctctgtacatgcataacttttacagttgtaataattaggtattatcttaaaagatgttgttacatttatttaatttggcttggtttatatctaaaagaaatatatttaattttttgtcttcaataagttatgataaattgttgggctatgaatttttctcagtttgctgcctagtataaaaatttagtggataaagattcttggccgggcgtggtggctcacacctgtaatcccagcactttgggaggccgaggcgggcagatcacgaggtcaggagatcaagaccatcctggctaacacggtgaaaccccgtctctactaaaaaatacaaaaaaaattagccgggcacggtggcgggtgcctatagtcccagctacttggaaggctgaggcaggagaatggcaggagcccggaaggcggaggttgcagtgagctgagatcgcaccactgcactcgaacctgggagacagagcgtgactccatctcaaaaaataaaaataaaaaaatattctttactgtagttaatgtgaacttacttgctaaattatagtagggatggagaagaaacagtaagccaaatactaagaaaacagtttgggccaggtgcagtggcacacgcctgtaatcccagcactttgggaggccgaggcgggtggatcacgaggtcaggagatcgagaccatcctggctaacatggtgaaaccccatctctactaagaataaaaaaattagccaggcgtggtggtgggtgcctgtagtcccagctactcgggaggctgaggcaggagaatggcgtgaacctgggaggtggagcttgcagtgagtgtggatcgcgccactgcactccagcctgggcagcaaagcaagactcgtctcaaaaaaaaaaaaaaaaaaagagaaagaaagaaaacagtttggttgtataagttcagccatctcatcttttgtgattgaattatcagtttgtgccttatctcgttttcttgcctgtccttcctcttggggattcacctctgtccacttttcattagcatctctcctagagaattacataaaagggatgaaattcaaacaagtccatttgactaattgggaccatctctgaccaaatgtttattgatgcaggagactgaaaataatatttaatttgagtatttggagaaggaaaattctgggcattttgttgtttatgaaaataaacctattaacctataactcttttcaacagcttgtgacaatttaaataattgttagtaaatggaactagtctcccaacttctcagtttgcttggaaaggtcgtgtgttagtctattttatgcgcctgtaacagaataccacaaactgggtaatttgtaaccaacagaagtttatttggctcatggttctggaggctgggaagtccaagatcaaggggctggcatctggtgaggaccttcttctgcatcattacatagcagagggcatcacatggtgggggaagaggaggggggaaggaagagaaggaaggaggctgaactcatccttttataaggaacccaccccctcagtaacagcgttaatccatctgtgagggcagagccttcatgatgtaatcaccccttagaggtcctacctctcaacacctctgcattggggatcatgaactttggggacacagtcacaccatagcaggtagtattactgagtctaccctcagcactgtgattattccctgtagcttttaaaggaagacaaatggactaaaatggaatgtgataatacaagaaggaaattatgaatatgactggtgtggtggtatgtatctgacctagtcttgcatcttatccttttaagatacagatgttttggtaggagtctgaaacctgttcgggcctattaattcaggttattctgatcacctctaaaggggaaaaaagaaatttgcagggattgtcatagtaatatctttaaaaaccttctaaaaagtgtgctagccccatcggttggccatttttctctcttagtattaagctgggtgtctttctcacagacaggaaggatctgactgccgatgcacaggagctgaaaggggagctatactgcctgccatgccatgataaaatgggggtccccatctgtggcgcttgccgacggcccatcgaagggcgtgtggtgaacgccatgggcaagcagtggcatgtggaggtgagttctaaatggtaaagggtaaccaatcctttcaaatctccatgattaaggggtaaccaatactttcaaatctccatgattcaggggtaaccagtactttcaaatcttcatgattcaggtgtcctggcaagattaggagactctaaagattaaacgtggacattttaaagacaattgactttgctgacagctaagaatatagaatgtacactgcttttgtgaatgtctcagtaatgatacaggatgtgcacttttgctcctaaagccttcttgaagcaggaagtgccatggtctgtatccagcagcagctcctcctttataggtgctactgagatgctcacctctattctctttttgggctattataataggctgtgtcttaaagtaaccttcaaagacagacacctgaattacaactgcagaagtattatgttatggggccacctatggccaaatgaaatgactgtctcaaactttccttcatcttctctgaaaataggttaactctggtgtttactttattagatataaaatatggcaattcaaaaatgacctatagcaattttttttcagcattttgtttgtgccaagtgtgagaaaccctttcttggacatcgccattatgagaggaaaggcctggcgtattgtgaaactcactataaccaggtattgaccttagtcactggatgctagatagacttttatgaacctaagcttatcagtagtttagctacaaggaaatctcttggaagatgtacattgttcagtagagatttgtttttaactttttatttgggaaataatttcagactcagaagctaactataaaatatacaaagaatacctgtatgtctttcattcaagtccacagtttgctttatcatttcccaagctcagtcttcctgtgtaaaacacatagttacgtaaatattatatacaagtacgatggctgttttgccaataagttcatcatactcctttatccctaaatacttcagtgtatatttcccaagaatatgggactctctaacataattgtagttatcaatattgataccgtactctaaccatttattccagttttgtcacttgagtcaatatcctcacagcattttttccactcccagactggacccagcctctggctgtgatgtttctttagccttcttaaatctggaacgtttccagagtcttttaaaatttttgatgacattgacattttggagggatgcagagggcccctaacccctttttaatagactactttccacttgggttcacctggtgcttctctgtgcttagatgaggttatacacagcaggttgtggcctcatacagtggcagggcatcttctcagaaccttgcccctggagcattttatacctctcctgccctggtgatctcccaggcatggtgctggctgataacatcactgtgaattacaatttccttccctcctctgtaagaaagaagcaatctgtgggcaatcattctatgaccatggaaatgtcctgttcctcatcaacctgccctagattcagcaccccttgatgattcttgtctctgcgccagctgcaaacaatacttctccagccccatgccctccacccatagtctggtcctcagcgctctgcctgagcaagaacccacctcctctcccgtctataggtttattcatttatctatttcttatccatatggactcacagatttctatattttgcatcacttatttgggtgttcaaactgtcatccgggaagtttttcttttaattgatgagagtgaattactttcattgtaagaagtaaaaacttgtcaaagaacttttactaattttctctagtagtgataaatcctcaatttagatagccagctatttttaaatgttcagtgttctaaaaattctaacacatcttgaactttgaccacctttttttattttcagctatttggtgatgtttgcttccactgcaatcgtgttatagaaggtgatggtaagtatctgtgtgagttttagattggtgccactttgacacaaaaacacttggggaatgtggaaattcaggttggtgattgctatggtttgaaatgtgatcgttatcagttactttttctctatctttggcgtattttccaagtaatctgtagcagtaagatgataatatcaaagagttggatttgttactgatttatgacactacttttggccactgctgtagtgttgtatgccagcaatcatgggaactgtccctggtggaccctaagacctgtttctgtgtccagtttcaggaagctctagaacaacgtttattaggaagagtttaatctgctatcgtagttagcaagaggcactttaacctgcacatgctaaaagctggcagttatcagcaagcatatctaggacttaccacccttgtactgtggtaattaggctgggctgattgattggaacagaaaggaagcagctgtgtttgctaagactcgctaacacacttctgccagagacttcctggcaaagttttgaacgatactgttttcagcatgattcatggctgcctgcagacatcacctaattcaggaaatacttttgaaactgttcatgtgcagtttgtgaaaacaatccaggaaaacaatctttagtgccattgaaaataaaacttacctccctcctctgtgaaatagatgccaggtgaaagaagctgcagaggaaactgtcttgttatcatcagctctggaaaaaagactcctacagaggcaaataagttaatgtctggatttttgaaaattatttacctagttcatatttccatgttgggccaacagcagtagggacagaaacagcaagctcacctaaacaacatgatgcatggacagttgccacatgtgcccaggccaagggggcacagttgctggtgtaagacatggcacacatcatttataacttcacaggatacttaaggatgggggaagattaaagtcagccctccgtatccaggggctggatccaaacatccgtggattcaaccaactatggatcaaaaatatttagagaaaaataacaatataacaatacaaatagtacagtataatgactatttacatatcatttacattgtactaggcattataattaacctagagatgatctaaagtatacgagatgggaccaggcgcagtggctcacgcctgtgatcccaacactttgggaggccgaggcgggcagatcaactgaggtcaagagttcaagaccagtctggccaacatggtgaaaccccatctctactaaaaatacaaaaaattagctgggtgtggtggtgcatgcctataatcccagctactcgggaggctgaggcaggagaatcacttgaacccgggaggcagaggttgctgtgagccaacatcacaccattgcactccagcctgggcaacaagagcaaaaacttcgtctcaaaaaaaataaataaatgtatacaagacaatgtacataggttatatgcattttatatcaggaacttgagcgtctgagattttggtatcctcacagcatcctagaaacagtatcctgcacatattgagcaacaactgtatacataaaggttgagggccgggtgtggtggcttacacctgtaatcccagcacttaaggaggccgagacaggagaatttcttgaggccaggagttggataccagcctgggcaacgtagcaagacctccatctctacaaaataaaaattaaaaattagccagatgtggtagcacacacctatggtcccagctacacaggagaatgagatgagaagattgcttgagcccaggagttcgagctgtgatcgcaccactgcaatacagcctggacaacagagcgagaccctgtctgaaaaacaaaagaaaagaagctctcaagaaagaggttcttggctgggcatggtggctcatgcctataatctcagcattttgggagaccgaggcaggtagattgcttgagcccaggagttcaagaccgtcctgggaaacatggcaagaccgtgtctctataaaaaatacaaaaattagacaggtataggccgggcgcagtggctcacgcttgtaatcccagcactctgggaggccaagacgggcggatcacaaggtcaagagattgagaccatcttggccaacatggtgaaatcccgtctctattaaatacaaaaattagctgggcatggtggcacgcacctgtagtcccagctacttgggaaaatgaggcaggagaatcgcttgaacccaggaggcggaggttgcagtgagccgtgattgcgccactgcactccagcctggcaacagagcgagattccgtctcaaaaaaaaaaaaaaaaaaaaaaattagccaggtgtagtggcatgcactgtagtcccagctactcaggaggctgaggtgggaggatcacttgagcctgggaggttggggttacagtgagccaagattgtgccactgtactccagcctgggctatagagcaagaccctgtctcatttaaaaaaaaaaaaaaaaaaaaaaaaggttcttgagaacctccaccaagtgccacagacacagtcgtagttctgttttggagttgaaattctaagctgccctgctccccatactgatgtatttccatgtgaccagatctctttcctctttctccagtggtctctgctcttaataaggcctggtgcgtgaactgctttgcctgttctacctgcaacactaaattaacactcaagtaagtgtacggttttgtccagtgtgaatcctaagactgaaaactttggggagacacttaaaaaaaatcctagaatttagaaaaagagaattatttgatttcttatttcctctttctgttcaggccttctgaaagtaaaggttcttcctttaactgttccctgttctttcttctattccttctttgtcctactcaaagggataagtttgttgaaattgacctaaagccagtctgcaaacactgttatgagaaaatgccagaagaatttaagaggcgacttgccaaacgggagagagaagcaaaggataaggacaagcagaaaaagaaaaagccagtctgtttgtaaacttttctatccctgtgtcatcattttcactgctttctcctttggttagtcctttggaatatgtttttgttctgtttctgtcttttgctttcttccccccctgcaacttttgggcatgtatttgtagtcatcagagattgaaatacaagtatttgtcctatgtagaactggtccttttgcataactgctaaaattacaaaaattaaatgaatacactccatacttaatacagttttgtggtcatgtatttcacttactctgtagactcactcacctcattttttaaacaccatatagtatacatttctttcatttttttttaatggatttaaagggaagaattctaatctcttaatagaccctggaaaacattttaaaggatttttgtctgattaactgtagcttttaaaatcctggtttttggtttccttgccacgatcatttaattgataaattataagtgttgtttgatatttttaaaaatgcatatattctaagttatgtattaaattatttcagcatggcgaggcatggtggctcacgcctgtaatcccagcactttaggaaggcagagtggaaggattgcctgagcccaggattttgagaccagcctggactacatgcctagaccccatccgtcaaaaaaaaaaaacaaattagccaggcgtggtggcccatacctatagtcccagctactcaggaggctgaggctgctgcagtgagccatgactgccactgcactccagcttgggcgacagagtgagactctgtctcaaaaaaaaaaaaaaatctttcagcatgtttcatatctaagcaaagtccatctgatttacgtaagacatcttcttctgtgatgttcgaatgtgcattcatacaatacccatatgctactgtttatgaattcatttcctcaatgtcttcaaactctttttttattcctgatttttatgagaagtatttcaatctttgaaattcttttgaattaccagcatgattgttccagttttccctcatagttaccattgtgtttggagctctaaaaatattttgttccagtttacatgtttccttctataaagaggaattaaatgtaaatgtaagattaaaacaatgaggccgggcatggtggctcacgcctgtgatcccagcactttgagatgccaaggcagcagatcacttgagatcagcctgggcaacatggtgaagccccgtctctactaaaaatacaaaaaaattagccaggcatggtggcgggtgcctgtaatcccagatactcgcgaggctgagacaggagaatcgcttgaacctgagaggcggaggttgcagtgagccgagatcgtgccactgcattccaccctgggcgacagagtgagactctgtctcaaaaaataaaaaataaaaaagattaaaactggaaagcttgctaaggtagtctgtctgaaaacaggaataatttttttcttttatcaaaaaaatggcagttttaatagcttttgctctaagatgaccttgggagaaaagccgtaaagtaattcccagtgtagtgttttaaaatagaagatttttcattttagatatgtgtttaggaatttcctttgttactaacattgtcctttaaaatgatcttgaagcaaagtctagtttaatataatgtttaaatgcagtaaaaatatcagcagattttataatttttgtcatagatagcaatataccactagatttatttcacaaatgctacctgaatataatttcacagacagtgaacaagttaccaagttgtatatttactcaattcaaaattaaacactctggatttcaacagtaataagctcctgtaattacctgttggaaatgcattacagatgatcaggaggctatctgaaaagttgtcttctccaggaccattttaaaaataaattgataatgtgtgttgctctagcttttcaaaagaatagttgagttcttcaaatagctaccgcttacaatgcaaccacaggtgatctggttacatttatgttaagagtgattaaaaactttcttccaacctttctgtcagataaccaaaataaccccttataatttaaaattaattaaacctcatggctacctaatttaaagtactaagtaagatcatgttgcctccaataaagaaatcattcacattataaaaatatgattctttcctttagataaatttatctttaaggtattctaaaatgtgattaccatcctaggcaatacgacaggaccctgtctctacaaaaaaaaatttttaagttagccaggcatagtagtatgcacttgtgtcccagctattcaggaggctgaggtgggaggatggcttgagtccaggagttagaggctgcagggagctgtgatcaccactgcactccagcctgagtgacagtcgaggctctgtttccaaaaaaaaaaaaaaaaaaaaagtgattgactgtacttaagtaaattatatttacattagatttcctgtttacttagtactgaataaaatgtaatctacagtctgtgttacacagatggatgtatagaaccaatttataaggacttttttttaaaattatactgaatttttatatatatatcacaataagaattgaggttaggattatggtttttttactaacatgaatataatatcatcacctagttgccttcgtttagttcagtacaattactgcacatcatttatatatctttgttgaatatgtttccactaacttctttttttttataattttttgtctttaggaataagtttgtggagtttgacatgaagccagtctgtaagaagtgctatgagaaatttccattggagctgaagaaaagacttaagaaactagctgagaccttaggaaggaaataagttcctttattttttcttttctatgcaagataagagattaccaacattacttgtcttgatctacccatatttaaagctatatctcaaagcagttgagagaagaggacctatatgaatggttttatgtcatttttttaattaaaaaagaaaaattcatataatcgtgtttaaaacacaaatgaagtcagtatttgcctttgttaacccttatccatttgttgacatgtagactgtttacaaaaaaaaaacacatggttaaatgttaaattttaattaaggcccccaaaaattaaatataactttttaaaatgaaaggagtcaccttttacatgactcaggtgaaaaaacagtataaacattaatttactttgtgttcaaaagaaaattccaactgctgttggggaaggacacagaaaagaaaaataaccacccaagaaaaacaaaaacaagaaaaacaaatcttatacaatcttagtatatttatcaaactagtagctagaaagtgaatatgcacattactaagacaaaaaacaagtgtaattcagaactacttgattttttttagttaaatgcaataattattatgcttagttttataacctgctctccttgtgaattattccttcaaatgattacttaacgcagtagtaatagctagctgtaggatgtcctttaaatttttgtgcaaaaaaaaatttataccaggtatttggaaatatactttacaatattggaaaatgaagtatttttaatgtattacagcaattatgtttctaagcttaatgttaagcatgtagtcttagaataggacatgaaattaaattgtatgtagcttggaatatattgcttcagaaaactgaatgtgtatgtcggtcatattgcctttataaccatgctaatatctatgctttatacatactcaaacttgccttgccttaaaaaaatacatactacatacttaaatcaggaattctagccatctcacagaataccaactaaaactaagtgcattgagatctgagattggtaaacccagattcatttaccacagctgtaattaagtttttagaaactattctctttttggggaaatccattgaagttaatttctgttatcttattagaagaaaatgatgttgatatgtgtttcagattttccatttgaaatcttataattaatttgatttatttactgtaagtaggaggtataaatgacactcttaaattggaacgaggggtgttttagtgtctgttttaggtcaaaattagtgattctatttttatcaaaagttttatcctgaagtttcaggaccactcttccttaataaacttgttaatggaaagcgagctttatgaacatttaaaaatgttgctgctgctttgttgcttaaaaagaaagttgccaagagagacttcttagggaaaatatttgggtttttttttccaaaaattgctgaaatattgttttgccatttttaaaaagtctcaggttattaccactctgccattaaatatttgtatgcctgcatttttaaaaattctgtgcatgtactttatggagtacattctatttttgttttcagataccctacaaccaattttttttagtaatcttttagaattgaaattatcataaatgatcgagaataatcatcacatagtttaagattgtatatgttgagtagtttaaaacaatctttgcattttacagtaagaatcaaagtcccttcagtgtgcctttgtcagctaatatgtgaccagcaatgacaaccttgggagtatttattaaatattatgctatgaatataggcaacacagaacagggtttgcagtatagcgtcttgatgctaaattctcatatacctctacacgagaaatatggaggagaaaaacaagcatttacatatattcttcgtcactttgaagatgcatgacctgaactcgactgcttgtgtttgtttacatatcaggcatacccaggcatctcctgcagccagaggttccattgctgtctttgctcagtcctcttttaaaatatgaattagtggacaggcacggtgcctcacacctgtaatcccagcactttgggaggtcgaggcaggtggatcacgaggtcaggagatcaagaccatcctggctaccactgaaaccccatctctactacaaaaaaattagccgggcgtggtggcgggcacctgcagtcccagctactcgggaggctgaggcaggagaatggtgggaacctgggaggcagagcttgcagtgagccaagatcacgccactgcactccagcctgggcaacagagcaagactctgtctcaaaaaaaataaataaataaattatgaatgagtattttctagaaattcaacttgctaagcctgtaatacttaagggtagtttatctagatacagtactttcttccctgataagtagtatcattggagcccttaggtataggagaagaggaagaagtttaaaaagtgtaagtgggccgggcgtggtggctcatgcctgtaatcccagcactttgggaggccgaggggggcggatcacgaggtcaggagatccagactatcctggctaacaaggtgaaaccccgtctctactaaaaatacaaaaaaaaacattagccaggcgtggtggcgggcgcttgtagtcccagctactcgggaggctgaggtaggagaatggcttgaacccaggaggcggagcttgcagtgagccgagattgcaccactgcactccagcctgggcgacagagcaagactccgtctcaaaaaaaaaaaaaaaagtgtaagtggattaaaagagaaacttggtctagttcataatatttttaatagggctttccctggctgctggaaaacttaggccagtaagcatctctttgtttaaagtcctacaagacaatttgaaataattcattgttcatgccaaaattctaagtactgtttttcttagcaagtgtaacataatcaggaacaatgggtacaagtaaaacattctttggatgatattcaaagccttattagcactgcacctgaataataggtcattttgcctcactcatttgccaaagtagccatttctaagttaaggaagtttttagataggctcatagccttgtatttcgttttagattgtaagctcaatggtagggatactatattggtaattatgttttcatatagcaaccaccacagtatattcttggtgcttaataaatgtttataattgttaacaataacctgttgtatattgtttattttgaatggtatatatatgaaatacatatgaaaattgaagtattcatgaatatataatagaaacaagtaaatgaataaaatgacctggttactatagataagccaaattttgaaccatctagaacaatggtgtagtcttccctctactcaatgtaaatgctgggttttttaattattattattattaagaaaggagatacaggccaggcacagtggctcacacctgtaatcccagcactttgggaggccgaggccagtggatcacttgaggtcaggagtttgagaccagcctggccaacacagtgaaacctcatctctattaaaaatacaaaaattaatagggcgtggtggtgtgcacctgtagtcccagctacttgggaggctgaggcagtagaatcacttgaatccagggggcagaggttgcagtgcaatggtgtgctgggattacaggcaatgagccactgtgccctgccctcagctggagtgcaatggtgcaattaagttctttctttttcaactcaaaatttgtctgcatctttacccaaatatccagatctgatactctaggcttgggctaatatagtggggtggaggaggcttgggttaaggtttaaagttccaagggctgaaccggaataaatggtgtatttatcaagggaagagcaaggcaaaaccagcaagtccaaaccatggaggcctcaaccgaggtgaggggaaaagttagggagccttaggaaagctctgaggagggaccccaattagggggaccgtagttagggtatgaggtttgtgagatcaggactggaattgctgcaagagaccctatgattgggtggcagcagcacgttgtggagatgagcctgcttcctcagcctcttcctcttgtcagaaccctttgcctctccctacacacgcacacacacatgcatgcaccatgctacagaaacctttctcagtcttgccattctctcaaattatgcgttggtcttcccttcatcttcagattctttaaagagtaatcaaagttcccacttctagcatgatgaagtgaggaggtcaacaaatctttccaaaatgtaactgtatagctggacaaaccatttagcattctgcaattttaccaaaggcacggcacaaatggggatgtgtttaagaatgaaagctggccaggcgcggtggctcacgcctgtaaccccagcactttgggaggctgaagcagaaggaccacttgagctcaggagttcaaaaacagcctgggcaacttggtgagacccccgtctgtacaaaaaaaaaatcaaaaaaggcatggtggtgcacacttgtggtcccagctacatgggaggctaaggcgggagaatcatttgagcccaggagattgaggctgcagtgagctgtgatcacaccactgcactccaacctgggcaacagagtgagacagaccctgtccctaaagaaaaaaaagaagaattaaagtgagccttggataagaccagcctgtgtccgtggcatctttgcccaggctgctacccccatttaccccagctgttgataacacacacagcggcccccagcagggcagcctgtggagataagctcccctgccacctcgctgcaggggctggaggcaagagtgaggaaggttttgatttgcagcatggctagttaaggtggtgatatcagtgaccaggaggaagaaaggccactgactcctagcctgaggctctgggcctttggagacgagcaaacgacctgcagattagtcatggatgtaagagggagctccgggaggtcggagagccagagggagcttagtaaactcttcacactacccaaatggactgaaggctcatagctggcagagattagagcaagcccaagccatgtccatatgcctagggcacacagcctgtgtgtgtgccggtgccagtgttaggaagtaaaagccggaacacccttgcaaatggcccggggcgtgcctcctccccattgcacatagatccagcagcagatggtggaaaccatattggctttaactgatgtttgacaaactatgcaaacaagaagcgacctctaagaagccattctgaaaaattaaagcaaacaaatgccaacaataaaactgaacaatgacctgagtgagtgcacactgtggaggagacaggcttcctgcatggagtccagccaggagacagtacagaatgcatggagcagctattggaagacagtgaaaactaaatagttgcaggcagctttcccaagaagaccagaacttgaagtaccaccaaaccagtggtgagataaccatgtttcccctacggcatcccgtgactaacctggcagtgggcaccagggtgcagatagaaagagctccagaagatgccctctatttctggctcaagtaacgggaaaagggtctcctaacattccgagggaatccagaagttcgttcctccccatttttcttttccctgttctctcatacctcagcccacaagcagtcccacagtggcactggcaccagccccaagaggagcccaggagccaagacgcaggagggaaccttctccaactgacagagctgtggtcccaagagggcagaaacaatccatgttgcttctcttccaattcagtcctcccactgcttggcttcagatgtagaaatgcatggtagagccagataccgaaagcctgttttctgcttggaagactaaaaagagaagcctcagcaaatgaaagcaacagggtaattgctgagagagagttaatcagtgaagcaaccccattaacctgtctataaaccccagggctcattcttgagctgctcctgcatagatctcgtcctgttcaacacaccaaagattgacagctgaactgagagaccatcacccacagacacaactggccactgggtggtgcacaagtcagacagaactgaatagtcctgtgaagactctggacactgaactgactttggaaccagactgcagaatggaggggtgggaacttgtggcttgaacctaatcaggtagattgcctggccaaaatgaaaatacctatcatctccataggatttaatttcattcaatgatttttttttttttagtaaatttgcaatgttttacagccttccccaaaatctaattccaaaatatctctatcaccccaacgagagactccattcacgttggcagtcacatgcactcccagatttcccctccacccagcccttggcaatcactagtctactttctgtgtctttgagtttgcctactctggatatttcatataaatgaaatgatatatgaggttttgtgattggcacctttaatttagaataatgttttcaaggctgattcatgttgtagtatgcattggtacttcattattttttatgcaaaagtaatattctattgtatggctataccacatttttctttgagacagagatctcactatgtcgcccaggctggagtttagtggctcttcacaggcctgatcacagctcctgcatggatcaaggagcatcactgcagctgcaaactgcagcttcaaactctccggctcaagcgaccctcctgcctcaacctccccagtagctgggcctacaggcacgtgtgtctgtgcccaataataccacattttaaaaatccatcttcagtagatggaaatttggatgtttccaccttttactaataaaaatagtactgctataaacattatgtataggttttcttttgtttttgttttttctttttttgtagagatgggggtctcgctgtgttgcacaggctggtctcaaatacctggactcaagtgatcctcccatcgaaaactcccaaagtgctgggattacaggcgtgagccaccatgcctggcctgtatacaagtttttgtgtagacatgtttacatccaattaatgaacacaggatgtctttccattgatttagctcctctttaatttctttcaacagtgttgtgtagtttccagtctacaagtcttacacttttggattaaatttattcataattattttattatttttgataatattataaatggaattgtttacttaattttacttgaattgttcattgctagtgtataagtaggcaactcattttttttaattgaccttgtatggtacaatctctttgaactcatttattatcactgatagtttaggtctttttttttttgaggtttcattagggttttctgtatataagatcatgtcatctagaatagagatagttttatttattctattcctatttcaatactttttgtttgcatttcttgcctaattgccctggctagaacatccagtacagtgttgaataaaagtgaagaaagaaggcatccttgtaagtcactattttttttttttttttttttgacacgtagtctcgcactttggcccaggctggagtgcaatggcacgatcttggctcacggcaacttccgcctcccaggttcaagtaattctcctgcctcagcctcctgagtagctgggattacaggcgcccgccaccatgcctggcttactttttgtatttttattagagatggggtttcactattttggtcaggctggtctcgaactcctgacctcgtgatccccgcccaccttggcctcccaaagttctgggattacaaagcactttgtaagccactgtgcccagccgtaagtcagtttttataccccttctttcatccctgattttagtaattagagtctttcttttttcttggtcaatctcaaaaaacaaaagctttatgaatttaaaaacgtttttcaagccgggcacggtggctcactcctgtaatcccagcactttgagaggctgaggcaggctgatcacgaggtcaggagatcgagactatcctggctaacacgatgaaacaccatctgtactaaaaaaatacaaaaaaaaaaaaattagccgggtgtggtggcgggtgcctgtagtcccagctactcaggaggctgaggcaggagaatggcatgaaaccgggaggcggagcttgcactgagccaagatcgcgccactgcactccagcctgggcgacagagcgagactctgtctcaaaaaaaaaaattttttttcaaaacagcaacttttgcctttgttgattttctctactctttaaaaatgagttttaaaaaatttaatagtgattaaaaaaaagatttaccaacttaactttttttttttttttgagccagagtttcgctcttgttgctcaggctagagtgtactggtacgatctcgactcactgcaaccttcacctccagagttcaaatgattctcctgccacagcctcctgagtagctgggattacaggcatgcaccaccacgccccgctaattttgtatttttagtagagacggagtttctccatgttggtcaggctggtctccaactccccaccacaggtgaatgcccgcctcggcctcccaaagtgctaggattacaggcgtgagccaccgcacccagcccaacttaaccttttttttttttttttttttttgagatggagtctgtcacccaggctggagtgcggtggcgtgatctcggctcactgcaagcttgccttccgggttcacgccattctcatgcctcagcctcccgagtagctgggactacaggtgcccgccaccacgcccagctaattttttttttgtatttttttagtagagacggggtttcacgttgttagccaggatggtcttgatctcctgacctcatgatcggcccacctcgacctcccaaagtgctgggattacaggcgtgagccaccgcacccggcccaacttaaccactttcaagtgtgcaatgcagtagccttatgttgctgtgcaatgtatctccagaaagttttcatcttttatttctatttatttatttattattttgagacatgatcttgctgtcacctgggatggaatgcagtggtgcgattatgggtctctgcaacttcgaactcttgcgctcaatcaatcctcctgcctcagcctcccaagtagctggggactacaggtgcgtaccactgagctgggttaattttttttttcttttgtaaagagagagtcttgctttgttacctaagctgctcttaaactcctgatttcaagcaatcctcccacctcggcctcccaaagtgttgggattacaggcacaagccaccacttggcccaactttatcttttaaaacttgaacatctatacccatgaaacaacaattctccatttcctcctccccctagtttctgatggccaccatttgatttgctgtttctgtgaatttgactactttagatacctcatataagtggaagcatacagtatttgtatttttgcgactggcttattccacttagcatgatgtcctcaaggttcttccatgttatagcatgtaacagaatttctttcctttttaaggctgagtaatactccattatttgtatacaccacattttgtttttccactcatctgttgatggacatttaggctgcttctgcgtgttggctattgtgaataatactgctataaatacagatgtgcaaatacctcttacaggccctgttctccgccgggcgcggtggctcacgcctgtaatcccagcactttgggaggccgaggcaggcggatcacggggtcaggagattgagaccatcctggctaacacggtgaaaccccgtctctactaaaaatacaaaaaaattagccgggcagggtggcgggcgcctgtagtcccagctactccggaggctgaggcaggagaatggcgtgaacccgggaggcagaggttgcagtgagccgagatcgcgccactgcagtccggcctgggcgaaagagtgagactccgtctcaaaaaaaaaaaaaaaaaaaaaaaaaaaaaagaccctgttctcnnnnnnnnnnnnnnnnnnnnnnnnnnnnnnnnnnnnnnnnnnnnnnnnnnnnnnnnnnnnnnnnnnnnnnnnnnnnnnnnnnnnnnnnnnnnnnnnnnnnnnnnnnnnnnnnnnnnnnnnnnnnnnnnnnnnnnnnnnnnnnnnnnnnnnnnnnnnnnnnnnnnnnnnnnnnnnnnnnnnnnnnnnnnnnnnnnnnnnnnnnnnnnnnnnnnnnnnnnnnnnnnnnnnnnnnnnnnnnnnnnnnnnnnnnnnnnnnnn

SEQ ID NO: 591 - DNA, 1873 bp, Homo sapiens
acaaagactgtgtcactactttgtggaatgttattttagaacttccagaatgcctcagtaaatcctgactgccatgtaactgtgtactgtgctgctgagctcttaacatgaagcagcagcagtgaccctggcgggccaggctgacgtgcgtgggaacagtgggagtgaccctggctgggaagcagggaggcctggatattgtttctcctggctctgtgtcctgccattctcatccctgtgctcagagctctcaagcacccacgatggccttctcaggccgagcgcgcccctgcattatcccagagaacgaagaaatcccccgagcagcccttaacactgtccacgaggccaatgggaccgaggacgagagggctgtttccaaactgcagcgcaggcacagtgacgtgaaagtctacaaggagttctgtgacttttatgcgaaattcaacatggccaacgccctggccagcgccacttgcgagcgctgcaagggcggctttgcgcccgctgagaagatcgtgaacagtaatggggagctgtaccatgagcagtgtttcgtgtgcgctcagtgcttccagcagttcccagaaggactcttctatgagtttgaaggaagaaagtactgtgaacatgactttcagatgctctttgccccttgctgtcatcagtgtggtgaattcatcattggccgagttatcaaagccatgaataacagctggcatccggagtgcttccgctgtgacctctgccaggaagttctggcagatatcgggtttgtcaagaatgctgggagacacctgtgtcgcccctgtcataatcgtgagaaagccagaggccttgggaaatacatctgccagaaatgccatgctatcatcgatgagcagcctctgatattcaagaacgacccctaccatccagaccatttcaactgcgccaactgcgggaaggatctgactgccgatgcacaggagctgaaaggggagctatactgcctgccatgccatgataaaatgggggtccccatctgtggcgcttgccgacggcccatcgaagggcgtgtggtgaacgccatgggcaagcagtggcatgtggagcattttgtttgtgccaagtgtgagaaaccctttcttggacatcgccattatgagaggaaaggcctggcgtattgtgaaactcactataaccagctatttggtgatgtttgcttccactgcaatcgtgttatagaaggtgatgtggtctctgctcttaataaggcctggtgcgtgaactgctttgcctgttctacctgcaacactaaattaacactcaagaataagtttgtggagtttgacatgaagccagtctgtaagaagtgctatgagaaatttccattggagctgaagaaaagacttaagaaactagctgagaccttaggaaggaaataagttcctttattttttcttttctatgcaagataagagattaccaacattacttgtcttgatctacccatatttaaagctatatctcaaagcagttgagagaagaggacctatatgaatggttttatgtcatttttttaattaaaaaagaaaaattcatataatcgtgtttaaaacacaaatgaagtcagtatttgcctttgttaacccttatccatttgttgacatgtagactgtttacaaaaaaaaaacacatggttaaatgttaaattttaattaaggcccccaaaaattaaatataactttttaaaatgaaaggagtcaccttttacatgactcaggtgaaaaaacagtataaacattaatttactttgtgttcaaaagaaaattccaactgctgttggggaaggacacagaaaagaaaaataaccacccaagaaaaacaaaaa

SEQ ID NO: 592 - protein, 383 aa, Homo sapiens
MAFSGRARPCIIPENEEIPRAALNTVHEANGTEDERAVSKLQRRHSDVKVYKEFCDFYAKFNMANASATCERCKGGFAPAEKIVNSNGELYHEQCFVCAQCFQQFPEGLFYEFEGRKYCEHDFQMLFAPCCHQCGEFIIGRVIKAMNNSWHPECFRCDLCQEVLADIGFVKNAGRHLCRPCHNREKRLGKYICQKCHAIIDEQPLIFKNDPYHPDHFNCANCGKDLTADAQELKGELYCLPCHDKMGVPICGACRRPIEGRVVNAMGKQWHVEHFVCAKCEKPFLGHRHYERKGLAYCETHYNQLFGDVCFHCNRVIEGDVVSALNKAWCVNCFACSTCNTKLTLKNKFVEFDMKPVCKKCYEKFPLELKKRLKKLAETLGRK

SEQ ID NO: 593 - DNA, 1510 bp, Homo sapiens
tagttcaagacaacagagacaaagctaagatgaggaagttctgtacagtttaggaaatagaggctttcaaagataattcgcagtgatgtgaaactggcctcccaagccctgataacaacatggccaacgccctggccagcgccacttgcgagcgctgcaagggcggctttgcgcccgctgagaagatcgtgaacagtaatggggagctgtaccatgagcagtgtttcgtgtgcgctcagtgcttccagcagttcccagaaggactcttctatgagtttgaaggaagaaagtactgtgaacatgactttcagatgctctttgccccttgctgtcatcagtgtggtgaattcatcattggccgagttatcaaagccatgaataacagctggcatccggagtgcttccgctgtgacctctgccaggaagttctggcagatatcgggtttgtcaagaatgctgggagacacctgtgtcgcccctgtcataatcgtgagaaagccagaggccttgggaaatacatctgccagaaatgccatgctatcatcgatgagcagcctctgatattcaagaacgacccctaccatccagaccatttcaactgcgccaactgcgggaaggatctgactgccgatgcacaggagctgaaaggggagctatactgcctgccatgccatgataaaatgggggtccccatctgtggcgcttgccgacggcccatcgaagggcgtgtggtgaacgccatgggcaagcagtggcatgtggagcattttgtttgtgccaagtgtgagaaaccctttcttggacatcgccattatgagaggaaaggcctggcgtattgtgaaactcactataaccagctatttggtgatgtttgcttccactgcaatcgtgttatagaaggtgatgtggtctctgctcttaataaggcctggtgcgtgaactgctttgcctgttctacctgcaacactaaattaacactcaagaataagtttgtggagtttgacatgaagccagtctgtaagaagtgctatgagaaatttccattggagctgaagaaaagacttaagaaactagctgagaccttaggaaggaaataagttcctttattttttcttttctatgcaagataagagattaccaacattacttgtcttgatctacccatatttaaagctatatctcaaagcagttgagagaagaggacctatatgaatggttttatgtcatttttttaattaaaaaagaaaaattcatataatcgtgtttaaaacacaaatgaagtcagtatttgcctttgttaacccttatccatttgttgacatgtagactgtttacaaaaaaaaaacacatggttaaatgttaaattttaattaaggcccccaaaaattaaatataactttttaaaatgaaaggagtcaccttttacatgactcaggtgaaaaaacagtataaacattaatttactttgtgttcaaaagaaaattccaactgctgttggggaaggacacag

SEQ ID NO: 594 - protein, 321 aa, Homo sapiens
MANASATCERCKGGFAPAEKIVNSNGELYHEQCFVCAQCFQQFPEGLFYEFEGRKYCEHDFQMLFAPCCHQCGEFIIGRVIKAMNNSWHPECFRCDLCQEVLADIGFVKNAGRHLCRPCHNREKRLGKYICQKCHAIIDEQPLIFKNDPYHPDHFNCANCGKDLTADAQELKGELYCLPCHDKMGVPICGACRRPIEGRVVNAMGKQWHVEHFVCAKCEKPFLGHRHYERKGLAYCETHYNQLFGDVCFHCNRVIEGDVVSALNKAWCVNCFACSTCNTKLTLKNKFVEFDMKPVCKKCYEKFPLELKKRLKKLAETLGRK

SEQ ID NO: 595 - DNA, 46338 bp, Mus musculus
  misc_feature (1)...(46338): n = A,T,C or G
cctgatgcccacacttgcagaggagtgatgcagagcagaaaggcagaaacaacctacctttgcattagctgggctggacaagaatctgctccagccacagtggaatatttttcagccataaaaaatgggctggaaaaatagctgaatgggtaagaatttgccagtaggtttaacaacctgagttcagtcctccgagcccacatggtagagaaccaaaagcaagttggtcctgtgacctctgctcttacactatggcacgggcatgctagcactcattcacatcacaagtgtaaataaaggtgagatgaagggttggcaagatggctggccccatggttacatgctgtagttagaggaacaggtatcagcagctcacaggggatccaatgtctttggttggtttttttgagacgggatctctatgtagtcctcgctgtcctggaacttgaactgtagaccggttggccttgagctcagaaacccacctgcttctgcaatacaagttctgggattaaaggagtgtgtcgccactgcctgatctggccttccaaaagccctctactccacgggcactacatgcaaatggtgtacttccatgtgtgaaaacactcactgaaaatacttgaagtgtgcaaggtgtggtagtatatgtctttaatcctagcactcgggagacagaaccaggcagttttctaggaattcaaaactagccagggttacgtggaaagaccctgtcccaaaacagagaaagggagagagagagagagagagagagagcaccaatctaggctacaacatagatgagccctggaaacaacgttagttggacgtaatgcttacacacctgtaaatgtggcactgagggtggatgtaggaaactgaagaagtttaagattagcctccaccacatggttcaaggcaggcctgagctaattgagcccccaccccaacccacacacccaatgaaaaatggctttagcggtgcactctttttttcccagcactcaggaagcagaagtaaagatgctgtgagattgcccttgtaacaaaccaggtgcagaacaataagcaggcacggtcctatcgaaggtcaggacaggtaagtagctgcctgggactccggagagcaccatgatggacagtgaactgggtttcctcctggcctgactgaaagttctggaactaaannnnnnnnnnnnnnnnnnnnagagcagactggcctcaaactcttaaaggtgtccctgcctctgcctcccaagttctgagattaaatgcctaagggcctatgtaattttgtgtatatgtgctcataagtatgggtgcccaaggaggccagaggcaccccatcatcgagggttggaattacaggcagctgtgagctacccttcatgggtgcaaagagaagggaaagctgttaactgctgagctctctagcttgatctcagatgtttatggcagtaagaataggatgaccgggcgtggtggtgcacgcctttaattccagcactcaggaggtagaggcagtctgagccctgagttccaggccagcctggtgtacatggagtttccaggccactcagggttacatagactctgtctgaaaactacaaaagctcagttgtctgcttgactgaactagtggataccccagatacacgaagctgtatctagggtggcacttactgttgtgttagagtggtggctcatcataccaggccagcacacttccacgggaaaggtttattgggggagaaaaggatgaaggagcaacaaagaaggagctaagggcaggcagatggacactgggaatgtatggcgattgccatggcaacagacatgggtccttttatggtcacctagggtgacatcatcactggatttggaggtgacgagcaaccataaagccggttcctgatgcccacacttgcagaggagtgatgcagagcaggagctgggtaccggctacctgactaagccacaccatggaaggagcaacctgtctcagtatgggatcgcctccagcccaagcctttccacataccccaaacagcagcagcactccagggagcctcctggggctctctggcactgggacaccactcaatccctattgtgtaagcaaatccaataccctttgtattctattctgtcggttcccccaagaactctgtgaaacattcacatggttgcttggaccagtctttatagaacgctttgcactagcacaaaggcagaaacaacctacctttgcattagctgggctggacaagaatctgctccagccacagtggaatatttttcagccataaaaatggaatgaggggctggaaaaatagctgaatgggtaagaatttgccagtaggtttaacaacctgagttcagtcctccgagcccacatggtagagaaccaaaagcaagttggtcctgtgacctctgctcttacactgtggcacgggcatgctagcactcattcacatcacaagtgtaaataaaggtgagatgaagggttggcaagatggctggccccatggttacatgctgtagtagaggaacaggtatcagcacccacagcggctcacaggggatccaatgtctttggttggtttttttgagacgggatctctatgtagtccttgctgtcctggaacttgaactgtagaccggttggccttgagctcagaaacccacctgcttctgcaatacaagttctgggattaaaggagtgtgtcgccactgcttgatctggccttccaaaagccctctactccacgggcactacatgcaaatggtgtacttccatgtgtgaaaacactcactgaaaatacttgaagtgtgcaaggtgtggtagtatatgtctttaatcctagcactcgggagacagaaccaggcagttttctaggaattcaaaactagccagggttacgtggaaagaccctgtcccaaaacagagaaagggagagagagagagagagagagagagagagagagagagagagagcaccaatccaggctacaacatagatgagccctggaaacaacgttagttggacgtaatgcttacacacctgtaaatgtggcactgagggtggaggtaggaaactgaagaagtttaagattagcctccaccacatggttcaaggcaggcctgagctaattgagcccccaccccaacccacacacccaatgaaaaatggctttagcggtgcactctttttttcccagcactcaggaagcagaagtaaagatgctgtgagattgcccttgtaacaaaccaggtgcagaacaataagcaggtacggtcctatcgaaggtcaggacaggtaagtagctgcctgggactccggagagcaccatgatggacagtgaactgggtttcctcctggcctgactgaaagttctggaactaaacagaagtgaacattctactagactatgctgacagtggtgagaaatcctcttatggtaggtttgctcctatgtctgatgtccacagctcctctggagtccccctgaagactgcagaccacctcaccttagaagtctgggagggggctggtgagatggctcagtgggtaagagcacccgactgctcttcctaaggtccagagttcaaatcccggcaaccacatggtggcttacaaccatccgtaacgaaatctgactccctcttctggagtgtctgaggacagctacaatgtacttacatataatgaataaataaatcttaaaaaaaaaaaagaagtctgggaggctaggtgcctgcagtatgcccatgactaagcaagacttcagtaagttcaacgaagagacccaagcactgtgggatggtgattcaagcccatccacgcagccaaatgagataatgctggctcgttggacatacatgtttttaactccccaacccccaaatgtagccatcaattgtaatgagcacctgtaaactctgacttagaaggcatgaggatggcctgcagtggaaggcttgccaggattgcctgggctgcagagttaagattgtccaaaagccaagagccggggtccagtgggagagagcttgctggccaccagcaagtgtggggtttgaggggcttctttattttacttgaggtggggcaggacctcactgggtgcccctcactggctgggaactcactctgtagacctggctggtctctaacttacagagatgcacctctctctgccttctcagtgctgaaatgtaaaggattaaagtgctggacccaccaccagaccttgtttgtgtttggtcaggttctggggatgaaccctagggcttccctaagcaagctgtgccaggcctgctgccctgcactcttgtgtggtttgttgctgaggccaagtccttcaggtccttctctcctagacctgacacagagggtggcccgtgagctggtatgtgtgcaagggagaaaaagaagggagagcgtctcctgcggagaaagtccagtgtctagggagctgctctgcccctccacataccacccaccacctaccttgccctgctgctgcctctgaccagcctatgctgtgagctctagcaggaaagcccagtgctagggagccacagctcatcaggagtcactcgccttccacatttccacaccttgcccctctgagccgctgcccttgccacatagcacccacaagcacaggagctttcctgagtgtgcactttcctgaatgtgacagtgttttacctgcatgtgtctgtccatcacatgtgtccctagtgccagaagaagggtcttgatcccctggaactgagttagatattggtaggccaccgtgtgagtgctgagaatcaaacctttgacctttgaaagagcagccagtgctcttgacccctgagctatctccctagcccctggagtaccctcttttcacccatctttatggaacagggaaaagcaggagacccatggaacctggctatgggccactgggaggccctgggaacccagccaggcttgcccccaattagcctggaggcaagccaagaaaccgtaggaataactgccctgtgactctggtgccagcttggtgagcctcttcaaaaggccccatggcctgggatctggaatgatggcacagctgtcccttaggactcctggctacctttctcctcatttccctgctacacgacaccaatagttcctgaacctcaaattctgcatgaaggtgtgttgttcttgtgttctagatacttgtgtgtagtagctcaggctggcttcaaacttggcatgcccctaccttagctcatgctgtgatgacagacaggtctagccacctcttggctgcatgtgtgacaacatcagctagtcatttaacctctctgagccaccatggccccatctatttaaaatggagacccagaattccaccctagtgggacaaagcaggaacctagagtaaccaaggcttttttagtgtggtcatgaactgtccttagccattagaggccccttctctaggcctagggaaccatcaaatgagatttcagacacaactttttccctgtctggaatgcaacttctcctggcaacactacctatgagcttatatttccaaaaggtttcacaaagctgaactggccagcaggactgccgagctgtggcgccaccacaagcaagcctgcgtcagctgctgctgctgctgctggcagggctgtgtcagctggctgtcgctagcagaacaggggaaccctcagggtagatatgtcccccagactacatctgtgtcctctccctcatctgagcctgtagggcagccctacttcgcctgtgggtcgagagcacttgggtttagggtcaggagctccagatacctagacagtgagctcatggctcgtgctgagtagacatggctaggacttcctgaagccagagcctcagctccagcaggggtcgggggctgccaatgctggaacaccactgccaccacctttcctaagacgggggcatgtttgaaatgagtcttgagactttgggggacaccctcaactttcctggatctattctgacccccccccccatttcacactaggattgctgtgtgaccatgggcagcttcccggcctctctggacctcacttccatcatctgtcctgttttctgaacccagattcagaccctcatctactgtgaccccagtcaggtcaacactcagcctttctgctccccagctgcctcacttgtgagaggggattctgtcaatatcgatatccaccctgacagaataaagaaagtaagcagccaggcattttggaatacacctgtcacctcagcccttgggaagctgggacaggaacatcaggaactcagggctagcctggactatataacaaattccaagccagtaagaccttatctcaaagaataaagttgagcttaggtggcagagtgttaaggtgacagaatgcgcagatgaatccccctgggatagatccatagcactggataaactgtggtggcacaggcttgtgagcacagcactgcagatgtgaagagaacgtcagaaattcagggtcattcccaacaacacagggagttcaaggccagcctggtccactgagaccctgtgtcaataaatgaaataattctaaaagctgtccttattattgaataaaagctgtatttttcatgggcagaacacttgataactcttcatgatgagactctgacaaatttccccggtagccagcccctaaggcccactcagaagggagacgctaacccctcccccgccagccttccctcaccctggctaccccttcccatgggtctgtctctgccccagcatgttccacatggaggccctgtctgactaccctagctctgcaaactaggggcttgcagcccttccaggcaacttcttcctgctgggtgaccttggcaagcaggtttctctaagcctcagttttcccatcagagaaatggaaagtagttgtcactgtcattgtggctaggctgtggggattttgtttttccccttctttgtagccttggttgtcctgtaaacagcctggcctcaaactcacagagatccacccgcctctgcctcctaagtgctgggattaaaggcatatgccaccacctccaggctaggggatttcattcttttcatcccccttcctcctcttttcccctcctctccttacccctcctccccttcttccttcttttgttatggaggatggaaccctgggcctagcgagcaaagacagcactctatcacagaacgcaccccagccaagacagcaactctgattttttaaattgttcttactttctgtctgggtgtgtatatatgtgtgcacatgccaagaatttatttttattttatgtgtatgggtgttttgtctgcatatatgtctgtgcatcgtgtgtatgcctggttaccttggagaccagaagaggatgagacatcccctagagctggagttataggcaattgtggtggtgggaattcaaccggggtcctctggaagagcagtcggtgccttaactctgagctctctcgctctcccacccactctttttcttttgttttgttttgtttcaaaatagctcccaagatgcatcctcggctcccctgaactcaggatgcttgcagagtgccaggatgccagccgaccaccatcacacctggctttctaaaagtgctttttaaaatttatttatttatttatattagatattttctttatttacatttcaaatgctatccggaaagttccctataccctcccccctaaaaatgcttttaaatcgttatatttattatggtgataaggcatgtatgtgccacagcacacgtgtagatcagatgacacctgtgagagtcagttctctccgaccatgtgggttgcgggaattgaacgcagatcctctcggttaatggtgatcacctttaccctctaagccagtggttcccaatctgtgtgttgtgactgcccccttggcagacctctatctccaaaaatatcataacagtagcaaaattagagttattaagtagcaacaaaaataattcatggtgttggggaagtcaccacaacatgaactgtattaaaggcccacagcattaggaaagtgaatagctgctgcattaactcaactcatcttaccctaaaaagcctaaaaacaacaatacaaaacaaataaacagaaaatgtggtacatttacgcaatggagcactactcagctattaaaaacaatgaatttatgaaattcttagacaaatggatggatctggagaatatcatcctaagtgaggtaacccaatcacaaaaaaaaaaaaaaaaacaaaaaacaacaaaaaaaaaaaaacccacacatgggctgggcatggtggtgcacacctttaatcccagcactcaggaggcagaggcaggcagatttctgagtttgaggccagtctcgtctacaaattgagttccagaacagccagggctatacagagaaaccctgtctcgaaaaacaaaaacaaaaacaaaaacaaaaacaaatggaaataaagaaacaaagaaaactaagacatcactgctgttattgagacagggtcctgccggggatgtaagattcccttggagttggagtcacagcgatcatgtgccatgtaggttccaggaatcaaactcaagtcttctgggatccattgaccggtgctcttaacctctgagccatctctccagttcctccattgtgttcttccccctacaaaagagccccacttgagcagccctgtttcaagggttcacaggctacttatgagtgactgttagttgccacggtggggaggggtctgtccaaaagcaaccagtgggctagtcggcttctgtggaccaggttgggtttttcctgctttgaggatcctaaacactaaatgggatcacagctatgttggcaggttttagtctgaactgctactgtacgctgggcgctgttccacgtgctgacttgtctccccatggacgtacacttgatccttggagctcagagttcagagagacatttaacaacccccctaccctggtatctcaaagagctctaaaggatgaggcaagaggatctccaatcagactaaccagggttacataatgagagaagggggggggggagtttcagaggtagtgcagggtggtgggccatctaatcctggactagatgaataaatgatgctggagaggccgcgacggtaggaaaacgcaaggttctcttaggtcatgggggtggggtgtggaaaaatgacgaagatggtgagtggcttccgcactgtggaaaatataagctgagtcagggggaaaaaacgattcgaagtgggggatttgacatgcattaagtccaatctaatgaaactaacactctcatgggtcgaaatgggcaatttcatgttcattccacagacgtagaaaggattggggtgtcttagctcgcagctcaagaggaactcgtaaagttaacagcccacagcgagcgcattgctaggaaggactgtgctggcccgggtcggctcttagagcatccaaactgtaccagtggcccagagaggttattgagtttctagggtcattacagctcagagagagtcaaccccggccgggaggcggccggaagcgaccctccgtaaacaaagccgtgtgtaggcgcagccccagccgccaggctagagggccggcccaaaggggcggagaaggaatgttgtgaatgaacgtgagacctccccgaaactcctcacaaggccaagccgtggggttccctcattttgattggctcataccgccccgtgatggacagcgactcttcttgcgacctcttattggatggcacagaaaagacggacgtggagattgtcgaatgaacagcggcatcttggaggcgggtctttgaggacagccatagaaagggagaaatagggcggtgggggcggggcctcgtctgaggaggcagcggctgctaagacggcttcattgttgtgaagagtcttaaaggggccgcgtcgtccgccggctcggccggatggagcccccgcggccaagcgcagccggggctgccccgcgggggacgagcccgggaccggggcccgtcgcagtcgccccgagccgttgttggaccttagcgccaagcgggtggccgagagctgggccttcgagcaggtaaggccccggcctgccccaggcctcacacctcgccccctccccagcagccagccccccacaccgccaccccgggccccgcaccccgagcctctctgcccgcgaccctccgggtctctattctgacctcttttcttcctcaagagacacaccagcccagagacccacactgccccactcctgccatagggtttccctgtcccaccctccaggaagaagacccccgtctctgcagggcctatacatgacacccctgtatccctttgctccagcctccagagcccaccagtcctctccagatccccgactgtgggacaagaggcagggtcactgagggaagggctctgtgcccctcctccccccttccccctccctccagctattccagagccaagattgagatacagaggcagagaggctcctggaacccctactctgtgacttgtggagtggtgtcccgagaaaaaattcccctctctctgtctaagggtcccccaagaagatgggaagggtccgaggctcctctcagtcccatacagctgtctttcagtctgactttgagtgttcttggcctcacaactcttcctgagttaggatggatgggtttggactgaccgtggactgagcaggctctgattcatgaccggaaaatccctccttagtcatctgccaactgtcaggagccgaatcactgactcccccttctctcgtagaaaccttgggtagggcctccgtgctgttcaccctatgtgacatgcacagaagaaccgtaaaactgtcttcaggactctcacagatctgccttggcccagccaggtgctaagagaactctgggcaggttctggagcccttgtggagttgttctcactttgaggaaactggggcacagagacgttgagaaacttgcccaaggtcacccagccagtcactagccaactcagattggaacacagcctcgaatgctggctccattccttggagtctacaggggatggcaggtcagcccttccctcctagagaaggggcttttttttttttcctcaggggaggaacaggggaagaaatacccagggtggaactgatgttgggagtctgaacaatttggtttagggatcctgaagagctgacttcatctctgatgtagtaatgctgaccccttcaggttctcaagctgtcatgccagcttcctcaggctcgttctgaggctgtgacactgacccagtgctatggtttcagcatcttgtgtccctgtgaagatgccatctccataaggggctgagcagagggaaggctaggaacccacgtcctcggtctttctcacacgtgtatctaacttcttcttgtcctgcacaaagcctgggctgaggagggttttaccccagacccctgcgacctgccagtaagagcttctagaatgttaactatgagccaggcactgttgtaaataaatatgattgtattggaacctattttgttcctgggagtttcattgtatcatccaagctggtgttgaactagttgacacaagtatagcctcccaagttgttgggacttcaaggtgtaccaccattcgtggctcacttatatatattttatcttcccaatctccataggatggttgattgtcacttgctattttatacttgagaagacagactcagagaagtcaggtgctgtttataagcagcaagattgtgctgcttataaacagcaaagccaggattcaatcccaggtttctaacccaccagcactccccacaggtggaggaaaggttctcccgggtgccggaaccggttcagaagcgcattgtgttctggtcttttccacgaagtgagcgggagatctgtatgtactcatcactgggctaccagcccccagaaggtgagcaggacacccgggtaccattcacccgtgggctgcacctgctacagagtggggctgtggatcgagtgctacaagtaggtgagtgagccttccaccctggggaggcttggagatgggggaggctggaggagagaggtgggccagggactggggaacttccaagaacctgctctaaggctcaggtgagataccatggcattctccaggtacagcactgggaaggcagaggcaggagatggagaggccagcctgagcttacatagtaagatcctgtttcaatgaggcagataaaaaagtactaaaaagtactgaagataatgatatagtagacttcagagactagaacatagtggaggctcagcgagaggaaggtgaaccagaaagtgggggtacagaaggcccggcatcagcaagaggacccaggtaaggggagaggagagcagtggagctcatgctggatcccagactggctcttgctgtagggattgagacatggctgataattctagaatgtgggctttagactggagacgggattatgaactgaaggtgaagaatgtcaggcagctgaactgatgaatggaaaaaaatgtggagaaacgaggaagcagggtcccagggagggccagagggttgaccacaggaagagccagttcctgccctcacacagagggcatctgcgatgcagtggtgtacaaagccaaggggaaaataatgtgaagactagatgtggtggcacacagttataacctcagtgcttaggaggctgggaccagagaactcaaggtcatgatcagcctggactaaacagtgaaccctgctctgaaaaccaaaacagtcttagtgtggaggcacatgcctaaggcagaggtagatggatctctgtgagttccaggccagctaaggcgtcatagtgagaccctgtcccagcaacaaacagaatgatcccaggcctcagtagctagacccagggagaagctgggagagagtgtgatgcttaggcaaccatgtcctggaagagactgtgatcaaaggccacgtgcagaacagtagagtgactatagtgacaaaaatttactgtgtcttttataaagaactaaaaggaagacgttggaggcttccaaacacagaagtaatcactgtgaacagagctggaaaagccagtcgcctgttctgctcatcatgtgttgtgttgaggaaccgtactccatggatgtggacggctcctgtgtgctgatgaggagaatgacttaagttaaaaacgaaataaacaagtgtcaggccatgaggtgcgggctcagacctcaggcagcagatctgggagagagtgcagacatctgaggtcagctctcagttgctgtcgcacatcagggggtctcagtgaggctgaagagcaaaaattagagctagaggagaaaacagactctgaaccccaggcagtaagcccagtagttctgaaatagaagaaaagaaaaagaccagagaaggctggatttaggaaatagggaggaaggtgaggaaagattttagcattgagcatggaaaaggaccaatagtgatggagccagaacatgagtcagactttatccttcaccttccatgatagctggtcaaggctcagccagggtaaccctgcctggcagcctctgtaccctttttcctgggcataacctagccacaggccccatgggcacccctggtatgaggaagccatgccttgcatgacgcacgttgcatcaggctgcccaaccagtcggatgagcctgacagacacccaggactgcccagggcttgctccatcatccccttgccctcaagtgccacaggcccttggcatgttcttaggaagttcagagcttctgaagctgttgtaaccatagcaacccaagggctggggaaagcatttcaaacattgtatctatgttgataatactatttattgatcattagaataaggacagagcagcaagggagatgtctcatttgttaaagtgcctgctgtccaagtgtgaggacctaagttcagttgctcagcatccatgtacagtgttagatgtctgtaacacaccactgagagtgggaggacctttgtggctagctggttagcctagtcaaggactagcttcatgtttaaggaaaaaaacctgtctcagagaataaggtggaggcccagggaagttgctcactgtgtttctgttcagatgggagggtagcctgggactcagaagcccaggaaccataaagctctaaggggaaaaggtgtcccagcgaaagggcattctgagacagggggcccaggatccacgcagctctgaggtgggacagtgtcccagcagaagggcatcctcagacatgggggcccaggagccacacagctctgagaggaatgcttcttagcagagatgttgcagctcctggagaccagggtggggggagggagggggtcccccagctgaagctgaggaactcaggagcctcagccctcctccacttgtttgcttcttcgcttctcttcagtgcttcttttcttcttggtttcttctgatgagagagtcacaccaggcagaaaacctcatgaaggagatttcttgtaggatccaggtgtggacagatgaatccagggatggctgccctctgctcccaggagcagacagcagggaaatgaacaaagggcagggctgtaggatttctgagggggtggcacttttcagggcagaagtttccagattgaggattggtagtttcaagtctagcttggggagctcaggaattggtggggtttcctgttcaggcttgggtgggttctcctgctcaaggattggtgggtttgtgtgggaaaatcagggattagtggggtttcctgctcagggattggtgccctttttttcaccccgtttttactgcaccaggccaatgggttagggtgggaagtccttcctggccacaagcagctttgtctgaggagccatctctgtggagctgcttagggaggttggagagaagatgtggccaccgtggacagctcctgcagtggtgtttcaggaaagccttaggctgagacaggaaaggtgtccaccgtggacagctctggagggagagctcctgccgagggggaaaggaggtgcatcactgtggacagctcctgtgaccgatggctgcaggcagaggagctgtgggacgctgccattttaacaggagccgccattttgacagctcctgtcaggggcaccttaccctgcctgtaggctaggacagctgctgctgtgatgacttttgcagagcaccacttagggcctttactcacacctttaatcctttaatcctggcactcaggaggcagagacaggcatatctctgagtttgaagccagcttggtctaaatggcctgttcctgaacatgcaagggtacacagagaaaccctgtgtcaaaaaaccaaaggtaaataaacaaggtgaagaacaattgaggccatccccccaaaaagatcaggtggttttttttgttttttccaagacagggtttctctgtgtagacctggctgtcctggaactcactctgtagaccaggctggcatcgaactcagaaatccacctgcctctgcctcccaagtgctgagattaaatgcatgcgccaacacgcccggcctaaggtcaggagtttggatttaactttatcaagccattctaaacgcttgtgactaattcacctagatattagagtggcatgtggagatcatcgttgctgtgtgtgcacagatggtgaaactgaggcatgaatagattaagtggtccatactgggcttctcagcagaattgtgcatcaaggtcttgctggggtgatccagtcttctcggtgtatgttttgtcttagggttccacctgagtgggaacatccgagaagtggggggtccaggggcgatccagtctcctcagtgtgtgttttttcttagggttccacctgagtgggaatattcgagaagttgggggcccaggagagccagagcatctctaccacgtctccatcagctttgaccgctgcaagatcacatctgtgagctgtggctgcgacaatcgggacctcttctactgtgcccacgtggtggcgctgtcattgtaccgcatccgtcatgctcgccaggtggagctgcggctgcccatctctgagactctgtcacaaatgaaccgggatcagcttcagaagtttgtgcagtatctcatcagtgcacaccacactgaggtgctgcctaccgcccaacgtcttgctgacgagatcctcctgctgggctctgagatcaacctggttcatggtgagcagagggagggaggggccatgatgccctgctttgggggtgtgacacactgagagacaggcacatcctaaggtgcctgagcccagggcacctgggcagttagaaacagggaagttgtaacactggcctgtcatctcaggactggggaggctaaggtggattgaaacatagtgccaccctgtctcatgttcagagagagagagggagggaggagagaaagagcagagggttagtcccagggtgaggtgtttcagagtcccagggtaaagacttaaagatgagaatcactgagttatgaatgaggtgtgcagtccaggaggtattggaagggaggggtctgctgctggtttgtttggctataatggtagaaaggtaacagtaatggatgggaactaactcgggtcatgggatgctgggtggattctaggaggttatgattcatcaccagggtgaactggtgccgtggaagagtatggggataagcagatgggtagatcagtacagtgcagtgaggggactaagcgttggaagggtggctgggaagagatggcttgcatgggactctgaaagccagtgggtatccagggatagtggcacacacctttaatcccagcactcaggaggctgaggtggatggatctctgagtttgaggctaacctgatctacatagtgagttccaggacagccagaactatagagtgagacccttccttaaaaaaaaaaaaaagccaggcagtggttgcgcacatctttaatcccagcacttgggaggcagaggcaggcggatttttgagttcgaggccagcctggtctacagagtgagttccaggacagccagggctatagagaaccctgcctcgaaaaaacaaaaaatagacagacagacagaccagtaggtgtgcatgctggggactggtaggtagatgttctgggaggagcatggagcagtgataggtatgatggaggcatgtttgtggaccagagtagctcaggagtgcacaacatgtctgatgggttgataaatccaaggcgaggtagtttgagtgtcgagacaagtccagagggtgggcaggtggagtcataggatgagtgcatacattgaaggtgggctggaggcaagactggtgaaccaggctgtgtacagaatgtgggtgtggaggaactggtatggagatgaggagatggatagaaactggcttactacggatgggcggtgtctggtaagatgatggatgaggaaatggatgagtgactgatgttttgtggaagatgaatggatacaaacagtgtttccatagtacctgactaagtgaacgaaggggcttgtagtgtttggtaccaatgcctggatggacagatgtattcatggtagaatattagatggatggaagagaatggtggagggatggatggttggataaatgagtgtgtagaggacaaatggatgggtggtgagttaataggtggattgctggtatggtggaatggattgtggactttggaggaatggacacagcaagagtggacactctactcttgtccccgcaggtgccccagatcccacagcgggtgcaggcacagaagatgccaactgctggcatctggatgaggagcagatccaagagcaggtgaaacagctgctgtccaatggtggccactatggggccagccagcagctgcgctccatgttcagcaaggtgccaaggctggggctgggcagagtagagggcccgcctggtatgcacttctctttcttaccacttgtgtctctgcacaggtgcgggagatgcttcgagcacgggactccaatggggcacgcatgctaatcctcatgactgagcagttcctgcaggaccctcgcctggccctgtggcggcagcagggtgctggcatgacagacaagtgccggcagctgtgggatgagctgggtgaggctcccattcatgttagcatctgtgccccaaatctcttctctacttagcattattaagtatttccaacatgccagccacctactggatgctggaactcccagaaagaacaaaacacaaaagtctggctctcctgggattaatatccagtagggaagatcatgattaatgttatatgttttggactagggatataactcagtggttgcaggcttgcatagtatgcatgctccagcaaatgtggatggatatgttcatggatggggagtggatgggaggatccatgcttgcatagatggttaagtgctacatagctttgtcccatggtgtcccacatcctccaaggcacagacatctgggatgcccagggacctgacgtaaaaccagccagtgttacagagactttgtacataccctttctgtatagttttgtcttgttttgattcaggctgacctcaagctcacagtggtgcaagggatgaccctgagttcctggtctttcttcccaagtgctggagggctcactggtcaccaccagagatggctggattggttgatcaattgattgatgctgaagatagaaccccaggttctgctaagcatgtactgcaccctgagctgggactcacttggtccttggtgttctctcagttacctccagctaacttaaagtgcaaggtcagggccacagagatagttgtcatcatattgtttgaagaataataacaagaaaaagatggctgtttctatccagtaaagactccatttttttgttttttttaagtcctttcaattcaatccatggttgatagaatcagcagatgttggatcctctaatgtggggctgaggactttaggctacgccacagctcacagttttacaaaactaaatagtgtcttcagctttgttgggccccaccagtgtagcagaaaaccaaccagacctctgtcacattgggtgtggcacagccaatggttggatgtttgtgtgtcaggaacaaggcctcaggatcattcccagcaccagtgtgtacacagttacagaacacgtagggaagtatcccagtaagacatagctatggacactttctggttttagccagtcttgctctgtatagctcaggctggctcagttctgcttagcctcccgggtgcttgattacaggcatgtacaacctgcagctactcctgtttctttgaactttgtatcatttgcacaaatctcaaaataatcttttttctttttaatattttcctcaccattaaaaaatgtgaaaatgtggcagagctagttggaaatacccataatacagtaccttggggtctgagacaggaaagtggtgagttccaagctagcctgggctacagagcaagaccctgcctcagaagaagagcagagataatcttaacttgatagtcacttgaagagagatcacaagagagaaagaaacgccaaactgtgggttgactttattgtctgtacggtgttttgcccattggctgctgtgcgctgtgttagatggtaaaaggcagcgtcgacaaggagaaagaaacaatgtaaaagcacactaagctgagcaggcgtgagtcctggcttgcagctcacatgcagtgtgacctagaacaagtggagtttctctgccgtacttcagttccccgacctaagttatatttacttatattgtatatatatgtgtggctgtaccatagtgcacatgtgtaggtcaaggggcagctttgtggagctctctccttatgtgtgggggtccgagggactgaacgtgggtcatcagtcttggtggcaagcacttttacccgctgtgccctatcactggccctactttatttctttacccatggataggacacatgcccaggctgcagcagctgcttatcagcctgtgttaatgatgttgtctgatctgctcttcaggggctttgtgggtctgtgtcattttgagcccacactgcaaaccagatgagcggtcgggatggctgcagctacttggcacatgggacaagctagatgtgtgcccactggaagaaggcaactattccttggacatccccaacctacagcctgctctaacctccaggacaggtaggaaggggcctattctgtttccaaaaaccatcaccacttactctagttcagcctactgtcaccgcactgtgtcccaggagagagatgagagggccatccagagggagcaagtgcctggggcaggagtaacgatggtgctcactaggcctcccgctagcaaaggatcagtgagaagatggactgggaaaaggacaggaacccagcgtgaggggccatgctgtgagtgtgggtgcggcaagtaaagagggatacggaagaaaggcagtagagaggtcaggaagaagcaaagatggaggagagaagagagagcagagaggaaaagacatcccacctgtgtggcagcaccatgacagatgccagcccctttccccttgaagatttgtttcaagaactcagatccattacctgcctagggtggaacctggggttggcacctggggggagcagctggcacagtgtgactgccagcaccatcattacacactgagcatatctcctgcaggctcagaggatgaagaagaggtgacagccgccagcccccgcaggacagttttcagccgagcactgcaggctggagagttgcactggaatgacagccacctacagaggatcctggccagtgattcctgtggccccaccctcactggcagtatgggaagtgacaagccaacctttgaccctcagggccaccccatctggctgggcgaaccttttcctactgcctgtgcacgggtggatactttgcgggcccatggttatccccacaaggctctgcggctggcgtgtgccataatcaacaccctgcgcctgcagaggcgacaccagcttgagagctacaagcagcagaaaaaaggtaagtggggacccaggagcccgaggcacacgccagccccatgagaggtatggctactgctgccccagctcccactctcggtatcgcaggcagaaaggactttatcattaaaaaagcactgttggttggatctgaagcactgtgtaatgggagaactcagtgggtcaggtgcagttctgtggtagaagactgttacaatgcaaaagagtgagggatcgggtgaaactgttagcatccatgtgcagttctcaagcctccgtttgcaccttgccgtggctaccctacttacagggccattgcctcagaacattgatggcattctttctgttcatctgcatgttacgcaagcaggctggttaatgtagaggcttccagaccctggagtaggcaggtttctgctacatgacccccgagatatgctttgcagggtatagagaagctaggagattgaactgtttgatacagaatttgctcacttataaacatgggcaacaagttgagctgtgtttcaaatacacaaacgtgggctaagggtttggtttattaggtagagtgcttgcctagccttcaggaagtggaggccagagagtcagaacctcaaggtcggaggtcaaggcccacctagaccatgtgagaccctgtctcgatggatggatggatggatggatggatggatggatggatggatggatggatggatgaaaacagagctggggaaatggcttagtaggtaaagtgctggttgtcaagcatgagaatctgagggtttctgagtttgttaccctgttacccacataaaagctgggcatgtcgctgtcccctggtgctaggagttgaagacaggcagatcacagggcattgctggcagcaagtcgggctccagtactgaagtttcaccgaagagcctctgtctcaaaagatataggtggctggaggaggagcccaaccctgagctttatcctcagtacatgcatggggcacgcacacttgcatacacatacaccacgtgtacacagatacatacaccagtcacactgaacagaaggagagaggctgtgactaatccggggacagaaggaaggccctggctgaggtcttggcagacgctgatgaagttgaagagtgtaagggaggaacaggctcgagtggtgaagtcagagggaatctccaggtacctcaggtgatagcgcaggcagagctcaggcaaggtgcattgttccaaggtcagtggaggtcagtggacaggcagaccttcagaacattcagttgtccatcattgaactttcatattgccccccgggccctggggggcctcaaagcctttgagcttggctgcagagatggggagtagggtaggactagaaaaagagagcactgctttgcatgttgcaggaagatgaggtggctcacaggctggcacatggcgttgggagactgctgtggggatgggaggggaagcctccagagcttgggtggatagagcacacctcttcccatctacagaactgctccagaaaggtgctactggtgtcacaagcactgaaggttgggtgggccatcccctggatcccattggctgcctctgcagggcactgctggaggcctgtcgcctggaggaggagcctcactctcttttcccaggtacccaccctgaaaacacttgcaggagggccagcacccaactctgctggccagatactgccctatcaaggccaggagccattgcttgaagtgagggggctaagagagttgggactctctctgaacctctcttcacttctgtcaccaagcttggggtcaaggggggctggggggagggaggtctagtcctcagcagccgtggacgtgttttccccagactcagccccagagaagcgtaagctggcctaccagcacgtgctggtgccggggagccctggagagtcctacttggcactggcactggaagtggcactcctggggctagggcagcagcgggccctgccggagggactgtatgcccaggacaaagtggtgcgcaatgaagaacagctactggccctgctggaggaggtggagctggacgagcggctggtgcaagtgctgcgaaagcaggctgggctgctgctggaaggtgcgtcggcttccccgcacagccctgtgggtcaggtatgaggccttgctgcctggcctcaaagtactactccgtggtccaaagatgctatgactggtcaaccaccacattgtaaaccccgccccatatcctggcccctcccatggcctagccctattggctctttgctaagtgttctccccctattgactagagcaggtgcacctcatcctccctcactaagccctgttgcctagggacccctcttttcttccgcgcctccacttgcatttggagcgcagggatagtgcagatgaactcaccctgtctctttaggaggccctttcagcggctttggagaagtgattttccgggagagcgtacccatgcacacctgtgcccgatacttgttcactgcgctgctgccccacgacccagatctggccttccgcctggcgctccgagccatgaggtaagggtgggagaaggagtacgcggctaggagtcccacctccaagccgggcctcagtctagtgagtgaggcctcccgcggctcatgaagaagggtgtcatgaagaagggtgtgtgtgttaccgttaaatggaaatgtataatacagtaaacttgagaatgattaacagctagggaccccaaacaagctcaaagtgtaggctttttctcagcctacctgaagctcggtggagacttttgagtagctggtttcatgcactgagggtatgactcagcagtattacagttgcctggatgtcggggtcagtgcccagcagtggccatatgacacaggtgttttttcagcagttatagttctactcatgtttaaaatacatagaggttagtggcagcattaaatcattcagcgactgcggctgccctaaacagaccagatagtgctggtggttgcaaaagcagagccgggtgctgacaggactcatgcagatggtgctgcagggcgtagggagaagagaacagaaagaggaaggacttggacagaacgctgctgcaacttcacatgagggctttgaggggacctggcaggcaattttaaaactagtggaggaagcagaagggctgtgtggagctccaggcactggcctgacctggcctggcctggcctgcagaacctggttggctccccgagaacacactggttcccagagcactgcaggagtgagggtgtccttttcccttttatggtagggtctgtgaaggaaatgtggcttctgagctctccgtgggcctgtgggtagagccagctagaggaaggggctaacacagggagtgtatctactacctacacacaactcctcccactcacaaaccagctgattcccagggcgtctgaatgtctggtcttctctgatgagggttgtttgaagcagaatgtcatgtagcttaggctggccacaaactctctatatagccaaggctgaccttgaactcacgattcttctgcctgcacctggtattgtaaacatgcagcaccacgctgctaaatacattttcttgctctgtcttttgtttgtctttgttttttgagacagggttttctctgcatagccctggctgtcctggaactcactttgtagaccaggcaggcctccaactcagaaatccgcctgcctctgcctcccaagtgctgggattaaaggtgtgcgccaccactgcccagccttaaatacattttcttgtcttgtttgtttgttgtttttttgagacccagtttctgtgtgtagccctggctgacctggaacttgctctgtagaccaggctgcccttgaactctgagactcacctgactttgcctcctaagtgctgggattaaaggtgtgtgccaccactgctaggctgaaatgcattttcttaatagttgggtgggatgacacaggtctgtaatcccagcacattgagtctaagatctcaagtttcagagcaggttgagctgagtaacaagactggatctcagaactagataggtgagacatgatgagaaagaaagaatggtagtggggaaacatgggtaattagagtcggacggtgacagagacatggatgtgtatttgacacctatgatctagcttttccaactctcaccctactccatagcagaaactctaatagttagcatcccgtctccccctttgagaatgtccccattgttttccctttctctttttcaaggtgacagactgtgcagactggcctgagactcttttttttttttcaaagatttatttatttattatatgtaagtacactgtagctgtcttcagacactccagaagagggcgtcagatcttgttacagatggttgtgaaccaccatgtggttgctgggatttgaactctggaccttcggaagaacagtcgggtgctcttacacactgagccatctcaccagcccgagactctttttttaaagtagttttttttttctttttcttttcttaaaagatttatttattattatacataagtacactgtagctgacttcagacgcaccagaagagggcgtcagatctcattacaggtggttgtgagccaccatgtgattgctgggatttgaactcaggacctttggaagagcagtcagtgctctaacccactgagccatctcaccagcccagtagtttctttttttaagtaatttatttatttttactttatatgcattggtgtcttgcctgcatgtctgtgtgagggtgtcagaggctctgaagctggagttaggcagttgtgagctgccatgtgggtgctgggaattgaacccaggttctctggaagagcagcaaggacttgaactgctgagccatctcacaaccttgtagccttagcctctgcagtgctggtggggcaggtgtgggccaccagacctggcttgtcatctgctccagctcctattcatgactgaagagctgtggtgtttctccctgtgcctgtctgatcctagtgaatgttcccaccatatagttgcacctgctgatattttattcctcctatgcctgaatagtactcctttgtatgtgggtgttacgttttctgtagctgttcatcatgtgttcacacatgtgttcacatgtgttgaccgccccattgtggccattgtgaattgtggtacagtatgcagcaggcaccctctttaatatactgatttactatggacatgtgcccagcagtgagcttgttgggttgatcatatacgtgtgtgtgtgtgtgtgtgtgtgtgtgtgtgtgtgtgtgtgtgtgtgtgcgtgtgtgtatgggggttgtttctgtttgtagtcgccaaggaacttcagaacttctgctttctgtgacagttacactaactcacatggcaaccatgcataagcttctgttctctgttgtttgtttttggagcagtggctcaagtgcagggtgctgtgctttattaggcactgctgtaatgctgagctcagacactgcagctcgacgagttccccttcctccctacccttatcaggatgtgtatcttctctgtatggtagtagccagtcaaattccagctcttcttttgataaggtgctggggatggaacccagggcctttgtcgtgctggaatctacagactgagccttgccccttccccatcaccttccctgggagattctcatgggggcagcaggcagcagtggcagctcactcagtgttttcttctcccctgctccaggctgcctgtgctggagacaacattccccgctggagaatctcaccccaacccactggactccatcatgagtaaccgcttcccccggtggttcatccttggccacctggagacccgccagtgtgagctggcctccaccatgctgacggctgccaaaggtgagggcagtgacagctatccttctagggtcctgctgtcccctgactccctctttatcctgcttccatttcctacccacactcatccttcacttctttgctgttttcgcttttaattttctttcttctttaggtttcatttctctttttgtgaacgggtgtttacctgaatgtctgtctgtgcatcatggagccatggaggcatcaaatctcttgggtagagttccagacagttgtgagctttaacgtgggttctagacatggctaggatcacactccagtcctctgcaagtgcagcagtgcccataaccactgagctgtctctccagcttgcttctaagaaagacatggtctcacatgagtcccaagcttgcctgcagtacaccatgcagcccacactgcccttgactcacgatcttaccccttggcctcatgttctgccacacctgctctactcttaccaactgtctcctctgtactacggcttgcacatgctctgtgaggacccagtgctgccaggtggcaggtaacaaaactatcccaaatcccatgttctatgaagaagatgtatagtcaactagccagggcctggattagtagtagagaccctgcttagcacgtgtaaagccctgagctcccccagtaccacaggaacacacagatggcctgggggatgatggctcatttggtaaagcacttgccacaccagcatgagagaggactggggttcagtcccctgattccataaaacaatgggtgtaagggtaggtgccctgcctttaattccagcacttgggaggcagatgcagaagaaggcatatttcagtgagtttgaggtcatcctggtctacatagtaaatcccaagctggccagagctctgaagtaaaataaaaaaggctggtatggtagcatacacttgttgccccagcactgggaaagtgagacagaggaccctcagggtctgctggatggccagccttgccctaagggagatgggtggaaaggcggctcagtggttaggagcactgtctattcctatagaggaccagagttcaatttctagcacctatgtgttagctcacaaccatctgtaactccaattctaggaaacccaacacatccttctggactctgcaggcaccagacaaaacacccttacatataaaaataaaataatgtgttcttttaaaaggtgggcggtgcctgagggatgacattcaagcttgactctggcctccccatacatgtgtatacacatatctatactcacatgaacacacacatgtatacattacatatttacactcacatgaacacacacatgtatacacacatatctacactcacatgaacacacacaaagccggcagacagtaaacaaggaggagatcaccatgcacaaagagagggtactggtgtcacgtgggacacggaactggtgtcacgtgggacacggaagcaggcagccttgtcttcttttctgtggtgctgagggtgggacccaggtcttgtgtaagctaggccagcactctgccactgagctgcactcccagttccctgctggaacttaaacacacacccatatgagggcagagctatgcttgggctgcagtaacacagtaacacaagctgggcagcttaagtgtgattctcatagattaagaggccaaagtccaagattaaggtggcaagagggtcggttggcaggagggctcccttcttggtttacacacgctgtcctcacttagtagaggtggtgggagagggaaggaaacaaagttcccctcccagggccttggcctctgacttcatctaacccagcaggccatcccatcatgggtttccaacataagaatttggaaggagaagggggcacagtttaatccacactgcctttcaagaacatttgaggcagaaggacatagccaaagctgaggccctgaggctgcaacacagctgtgatatctgaggaatgagatgattggctggggtggaggtgcagctcagaattcctgcctagcctcctccagggatgggctgggagtgggacttagagtgggctgctaacctagaatgtgtgatgccccggcttctgttcccaacactgaagttaggataagcagaagactcgtgagcctggagcatagtgggggagcatagacttgatggaattggtgatgatttgagcaaagccagcatgtagagcagatggttaacacacactaggtctatcccctagctgtacaaacaggaaacagctaacacttagggagcctcttaaagctacctctttgcagaagcattgctgagttccctgccatacacaggaggtcctgtgtgaggattggtgtgaggggtcattcggcttctctttactgctgttccaactgtggcctctgttactccttctgcccaggagataccaagtggctgcatgcggttctgggctccgtccagcaaaatatccactccccagccctgctcttcaagttggcacaggatgcctgcaagacagccactccagccagcgcaccgccagacaccgtgctgctgggcatcgcgctggagctcggcctgcaggtaccccagctgacacatcaggagggggcgggccctgcggtggttgagggagaccctgcccctggggcaaagttattatagaccaaagttgaggcgataagagatcactgtaggtttgatgctcgtgaatgggacccatctccaggactgtggttaaagctgaggaatgggccacacgaggggctgaaaatgctggtagagtacttgctaacatgcactaagccctgggtcccagcctcagcaccacctaagccaggtgtggtctagcattcaggaggtgtaggcaggagtcagaaattcagggtcaaccttggctacatagagacttggaagctagcctaagctatttgagaccctgtctcaaaaataagtaaactcattaaaaaaaaaaaaaaacaaaaaaaccaaaaaacgctcagatgccaggtgtgactgcagggctatagtaggttgtgctaggtcctctattccatacccagtagaaaaaaaaattttttttgcctcttggtgccattggttaaaataaaaaccgtgaggctagagagatgtctcaacagttaaagtgattgctcttccaaaagacccatgttcaattcccaataccacatggcagttcacaacaggctataactccagtatcaggggacctggtaccatttccctgcctctgctactgcacagatgcagggacagacatagacagaggcagaacactatgcacatcaagtataagcaaagtaaggaccgtgaatgcagcacactcagccagtaaggaacgcccctgggactgggacatagggtaaagctagcggagggaggggagggaggtgttgcagttcaggtgaagggcttcctggggttgagccttgtaagcaagagctatagctgaatatcactttctgcaatgcaaagtctgagggcagtcttcatgccgtccataggtgagcagtcaagggcatagatctgtggggtccttgcaaggctagccgggcatggggactgaggacaaggcctcagacagttctggagacgaagtaaatacgtgcaaacagcttcacgtggtgatgcacgcctgccactgtagtactgggaggctgagctcaacagccagtatgggctacagaccctgtctcaggaaagaccaagccatgtgagagtggttgtcaagacgactcagtcagtacagtgcttgaaaggaaaattaggtgcccagaccaaggttaaaaatataattaaaaagcatttgggaggcagagacaggtggatctctgggttggaggacagccagggctacacagagaaacccagaaaaatatgaagaattaaaagctatcattccagcaatggggagtgggggtggagacagacaaagccctagggtttgctgatccaccattgcagcctaacaggtaagaccaagatgggcactggagagctagctcactgagagtacttgttgctcttgcaaaggtcccaagttcagttcccactacccatgtctggcagctctctagcacctgtaactccaattctaagggggtacaactcctctggcctccaagggcacctgcacacacatgcacatactcacatccatatacacatgattaaaaaccattttagaggagaggggttcaatgcagggtctctgtgtgtagccctggctgtcctggaactcactttatagaccaggctggcctcgatctcagaaacttcccggattaaaggcaggattaaaggattaaaggcatgtgccaaaaccaaaaaattgttaaaaaacaatgctgtggctagctcctgagcagtgcacctatggttgctgtctgacctccgcatgcaggcacactgtagacttaaggcacatacacacaaccaaagagacaacctaggacaacttgcattcccagacttcataactctagggatcagtgaggggacaacaagactggagaggagagaccagtgtgggggctcacagaggcagattcagggctgggcctcaggacaagcagacatgtaagaggtttctttagggtgcaattcacagggcaggggctgaaggtcgtgcaccttgggactcggggaagaatcttctgacttgaggtgtggagctttccagaatgggaggcaggttggttggttataagtatgactttagtgaggccttaggtcccagcagcactggtcagtgtcactgcagagagccccagccatgtcaccttcattttcacagcaccaccgtgcaatagattctccttttgaagatttatttgtgtgtgtgtgtgtgtgtgtgtgtgtgtgtgtgtgtgtgtgtgtgtgtgtgtgtgtgtgtgtgtgtgtgtgttagtatgcacaggtacaagcagataagaaagccaggaaagagggtatctcttggagctagagttgggacatgggtgctgggaactgaacttagtccttgggaagaggacttaagcatttgaagcgctgagccatctctctagcccctgattttgttttataaggacactaaggatcacccaggtttctgtgctagcatggcaagttctttactacctgagccaccttcacagttctttttttccctccactgttttttccaggcagggtttctctgtgtagccctagctgtcctggaactcactctgttgaccaggctggtctcgaactcagatatctgctggcatctgcctcccaagtgctaagactaaagttgtttgccatcactccacatttcatgttttaaggattttatttttaattttgtgagggtgtgtacgtgtgtgagacgacttgggctgtgtgtggatgtgtgcatacgtgtgtgggtgccctcagaggcactggataccctggagctggagttaaaggtggttatgagccgcctaccatgggtgctgggaaccaaactcccaccctttgcctgagcagcaagtgctgttaatctttcccggcacctcctcctagtctgtgtttttatctctattccttagagccagaaactgaggccagaggtagctcacccaggcctgctgcattagctctgcctccagcctcctaggtcctaagccatcagctgtagcaggactctgaggaccttcctttcctttccctctaggtgatgcggatgacactgaacaccatgacttggcggcgcagggagatggttcgctggctggttagctgcgccacggagattggtaagtacctggaagggccagtgaggaaatcagacaggcaccagaaaaacttgccctgcctggcatgctatgcagccctttaaccccaacactcaggaggcagaggcaggtgaacctataggctgaggcctgcctggcctacagagtgttcctgagcagctgaggcttcatagtaaaactctgcctcaaagcaaacagatagaaacaaaagaaagcaggcccttccttccctgttaccagctctaggccagcctgggagggagcatcaggtggggtgatggtcaggctgagctagttaggagtccagggaggctacagggcatccactcagtccaaccactcttgctcctttgaaaaggggggaaatttcctatccagacaagacagtgcacctggaatccgtgcactgggaggctgaggaagaaatgagaccctgtctcaagactctgggccagagctatggctcggagctagactcgttgcttagcagggactgactttcccagtggcagtagaaaaggaaggctgggtgtagttcatttgatagagtgcagatctggcatgcaccaggccctgtgttctctctggacatggtggtacaagactaatcccggcacttgggaggttgaggcatgaagaccagaagttgatccttagctacacagcaagtttgaggtaaccctggactatgtgaaagcttgtctggtcttttttttttttaattaatcaattttacatgtatgggtgttttgcctgcatgtatatctgtgtgccacatgtgtacttgtggaggtcagatgatccctttgagttatgactggcttaagtcaccacgtgggtgctaggagtcaaacccaaggcctctgaaagggcagccagtgctcttaaccactaagcatctccagccccatgagaccttgcctttataaacaaaaacaaacaaacaaacaaacaaacaaaaactaattgggcgtgatgacccacacttgttatcctagctcttgggaggcaaaggtagttggatctctgagtttgaggccaagtggggctgcagagtgagattaactgcaccccttcacacacacacccccaaaaaaaaaccaaaaaaactgatgaagctgggaggattcagagccaatggttgtagggtgggaagggaaagggcagggtctggctgcacagatacacactccgccctctccccacacccaggcccaccagcgctgatgagcatcatgaagaactggtactccttgttcaccccagtggaggcggtcaccatagtggcagtgacaggcaccacgcatgccactttgctgcgactgcagctagatacagctgggcgagaggagctctgggcttgtgcccgcaccttggcactgcagtgcgccatgaaggatccccagaactgcgccttgccagccctgaccctgtgtgagaagaaccacgcggcctttgaggctgcctaccagattgtgctggacgctgcagccggtggcctcggccacgcccacctcttcacggttgcacggtatatggagcatcgaggcctgcctctgcgggcctacaagctggccacgctagccttggcacaactcagcattgccttcaaccaagacagccaccctgcagtcaacgatgtgctgtgggcctgctccctcagccactcgctggggcggcacgaattgtcggccattgtccctctcatcatccgaagcatccactgtgcacccatgctctcagacatcctgcgacgctggacactctcagcacccgggctgggcccactgggggcccgcagggctaccaaaccactagggactgacagggcaccactttgtcagcttctggatgccgcagtagccgcgtacataaccaccagccactctcgcctcacccacattagcccacgccactatggtgacttcattgagttcctgggcaaagctcgagagaccttccttctggcaccagacgggcacctccagttcgcacagttcttagaaaacctgaaacagacgtacaagggaaagaagaagttgatgctgttggttcgggaacggtttggctgaggaactgcagaaagccgggagcatgggtgtcccaggcccaccttcctcaaacaggaggcccatggctacttgcagtaaagttacagaggtgggaggcagagggtgacatcattccaggtgtgtgcctaggagtgtgcagacaaacgggacatgcgatctgaggatccgaagccatactgctaactagaccctgcagggagtatgtgcctgggcacctcacaaggaagaagcaagctctggctcttccagactcccagggtcagctgggacttccaggagaagggctgggccagagtgaagttaggcctccaactcagtgcagcagatgctccagagccggagctggccggagcctaggcacttcacatcagggtagttacttcccactgtgtttctcccctctccacagctcagggctcctgtcccactgccctgcgcccccagtcccagctttccagcacaaatgcctcaccccactgaaggatattaagaggtcttgggcctctgccacatacctcacccccaaatacccttgtcaagccagggcctgtcctctcttgggcaccaaggtcacagggtaggctggggacagctctctgctggccagaccccaccactagtaactggatacacaactcaggagtcaggctgccctccagcctgttgtgggaggcacaggcagacagccagggaccccgttctgtcttcctcttgctctgcacctccatttgtttccccactcccttagtttccccatgtctgcatctctctcaagtcccagctgctgacaggccttcctttatcccaggccttggcccagggaggaggagaagggagagcctccaccccagacgcacctgtcttctcttgtatattaaggaaaaagttggcatcattttgtaactttttttcttatttattgaaccccatactgtattcttttcctttttttttcctttttttttaaaaaaaagattgaacacaacttctttttaacttcaagactgggttgcattgctaacacaaacacccggggccaggggtacctaccacctgctcaattaaccaaaaaattttccatctcggtttttgggcacaacttgaatgggacaggagaggctgctggtttcttcatggcatcgtggtgacacgaagagccacctcttgctggtggctttactgcttttccatctgcatgtcataatctctgcaagtcaggaggcttaaaacgcccaaacctagagtctgtaggtttttggaaaatgcacccagattgcactgtccttcattgcaggaaatgaccaccagggggcgtctggctccagacaacgtcattcggagctccggaggtcgcaccaggtgcggagggcagctggggacgcctgtgtccccagtgacctgcccattgcatttttgggctgtggatgagactcccgttcttagatggattcatccagcggacggcctgagcattcttctcattctccggttctttatgtccttagctgtgtctgacagggtcattgtttaggaccgttctctcggaagctgtgtgtgtgtgttgcctctgtggggcactatgggagctggctgtgactatgagtgtggccatagttcatggtgcgttcctttgctccagggagccgatcagaggcgatccgccccttagcccttctggcgcagacgggcgcgcgcgcgtgcgtgcgtgcgtgcgtgtgtgtgtgtgtgtgtgtgtgtgtgtgtgtgtgtgtagacgggcgcgcgcgcgtgcgtgtgtgtgtgcatgcgcgcgtgtctgtctgtgctcgcatatgtgcccgtccttaagccctgtgtgtgtgtgtgtgtgtgtgtgtgtgcatgcgcgcgtgtctgtctgtgcgcgcatatgtgcccgtccttaagccctggcatcttgccagtcagtgcatcccagcataggcagagtacattcttgtaacatactccctcatggaactggggtgaccacagattggtctcatacaccccaggtctgggttatccctcccgttcaagccatccccaaaggatcccaggatcttcaggtcgcagcacctactgaccacagaactatatttacaccttcctagaagcaggtggagcaaggttggggataggtgcaatgcaggttaggagcccagggtgtggtagatatagtggtgcagctggtattcccaaactccagacactggaggagtttgattcaaggtcagcctggtctacacagaaatgctgtttcaagagaaatgaaaaaagccagcaacacacatgtgggaggcgggaatgaagagacgtcagcccttacggaatgaggctgtggagcttttatttagttggagaacaacattcaatacaagctttcaactctgttcttccacccaggcttcgatttgcccctgcccagagtagggagaggacactgtatggtctgggaagtgtaactcagcccgttccaattagtctgcatgcagtctcatttgtgggtagtaggcaactttttaacttccaagcctggagattacttcaacaggccaatgggggggtgggcatggatccgttcctatcctttgaggcctgtgtggacctcgctccctgcctcgctgtcaccagcagaaagctgcagaccccatgggattgctaggcacactggatcaggtcagtgccttccggaagcagagagttggcatttaaccgttagagggcctaaagcagcttcctcttgggtaactgacttcaaagatggtatgtataaggggtggtgcctgagccctaccagacttaggaaaagaagggcttccaggccctgaggggacataactggcttttaatgcaagggttacccgcccatccatctgttttggggaaccacagaaatctcaaggtggacacccagatgcaggcttagaggctgagcctccagcagacaactgggcttaggttggactaattaccccattgtttccaggtcttgctcacggcagacattctgcagggttgccagctcctagggggctggactcctgttcctgctgaactgagccagtgcactggaatcaactgtttcagctcagtaggcacgggaggcggagcccggggagaggcagagcagggtgggcagcagcggcctgaggagatggggtccagggggcggaacttagccactgtgaacacgactttgctgtggaccttgctcacaagcagctaagccctgctcctcaggccagttgtcatgataggcttctctgttacccagtacccaagacagacatccttggcgacaggagcccccaaggcagagcacagggtcagttggaaatccctggcaatgtgatttgtgactggcatcaaatcccatccccaggaaccccagccgtccgaggcacagtgaggggggcagcaggtgggagcggagtgtagcacctaaagagagaaagaagagacagtgagattggagcattcttgcttgcctgcctatcttgaccaggctgggtctcacatagctgaacacaaggtttccgaatgcaccagttcttcctgcctctacctctggagtctaggattataggtacacctcaccacacacagtttaagtggtgctggggacagaatctaaactcagcttgctgatccacaccctagccctcctctacttccaagagggaagaagcattcccaaaaaagaggagcatcgatccgtaggaaggttggagcgaggctgctggatgctgggcacccagcagtgcctctaccccagccctacaaagcgggaggtgcctgaagccctaaggccaaaggggctgcagagccttcccagctgcttcccactctgcttctatccccacccacagccctgagcccaaagcaggccaaatggggccatggagaggaagctgagggaggtggacggttggagggaggaagtgacctcaccccagctggcgccacttcctagaagcctgaagggcaggaggaaactccagggcctcccacctcagccctctcctccccagccagctcagacataaccccacccccaccccacaccacctagggcccaagcaaggagaagcaggccgatgcaccccaaaaataacacctcagtaaagtttcccctaggccttccaagcctcagtttccccatctgtaaagcagactacaacagttgcagttggtggctcacgtttatctcagcattgaggaaactgaggcaggaatgttgccaagaatggagtcaaaagcctgcttaagctacatgatgagttttaggcctaactgggctacagtttgagaccctagtcttaaagaaatagaagaaaaaacaaaaataaaacaacaaaaccccaaaccttctactaggaaggccagtgaaaacttacagagaaggtatttagcacccagtaccagggcaagccacaaaatttggggcctacccaatgtagagtagtgtcctacgtgccagttaaagttttcaggggccagcaagctggtccagcaagtgagcagagctgctatggagcccaatgccctgagctcaaacccaagaaccacgaagaagaaaagcatacggacccttgcaagttgtcctctgatctctgcacttgggaacacacacacacaatttttaaaaattgtttaaagaatttcaatgttggagagatgacaggtttctttcccagaacctacatgacaagcacagctatctatagctccattcccaagagctccaacgctccccactggcccctgtgggtaccaggcatacatatggtgcacagacgaacgcgtaagcaaacattcacaaacagacaataaaaataaacttaagaatggtggtgcacactgttagtcccagcacttgaaaggcaaaggaaagcaagaaccaggccttggacagtactatctctaagagttcaaggccagcttggtctgtgtagggagtttcagaccatccagggctacatagtgacacaagtgaccctgtttcagataaagagctgactcagtggttaagagcggctactgctcttgcagagggcccgagtttggatctcagcacctgtcacaactacctgtaactccagcttctggggatttcactccctcttctggtctctgagtgtactgcactgtcatgcacaaagaccagacaacacacacacacacacacacacacacacacacacacacacacgtcttctttataaaacatcagggtcttcagtgataggtcaatcaataaagtggtcaccatgtaagcaaaagggcttgtgttgtccccaggtatggcaattcacacttgtaattccagagctggggaagggaagccacaagatgctctagggctcaccaccagcccgcctcaccagctccatgtcccagtaagacaccttctctgagaaaacaaggttggagctagagagatgactcagtggttaagagcatttgttgctctttcagaggacctaggttgagttccctgcacctacacagtggctcacaaccatctgtaactccagttacaggagattctatgtctcccaccttttaggacatcagacacacacaatcctgagaaactacacttgacattgcactctgtacacacacacacaaaagggaggagagtagaattttcatgccatgcaccagggccaggtcttatataagccctacagtggtgcatacctgtgatcccagctgggaagagacagaagcaggaagatatatatgagtttgaggccagcctggtctacatatgaggccctttttaaagggggagggggaggaaagggaaggaaagggttttggctacggggcactcagttctggagctcgtcagcctgcatgtgagctatgcagcttctttgctggctgactatgggcaaagaacacacgtgctctgtggcaaagtctctgtctgcaagaaagcaaaaatgaatcatttcagagctcgagatgatgtgacatgacagcagactgcagacgtgtaatccctatatctaggacaggggtaaaaagatctcaatttagaagccagcctgggctaccaagacatggtgtgtctcaaaaagaaagggctagagatggctcagcacttgctgctcttccgggggttccaggttcaatatccagcacctacatagtggctaacaactatctccaactttagttctagggatcctgacacttttttctgaactctgcagacatacatgcagacaaaacatctgcacacggaaataattgttgttttggtttggttttgtttttttgagacagggtttctttgtgtagccatggctatagccctggctgtccttggcactcactttgtagaccaggctgccctcgaactcagaaatccacctgtttctgcctcccaagtgctaggattaaaggtgtgcgccaccacacccggtgaaataatttttaattaaaaaaaaaaaaagcaacaaggggtaaggctcaatggcagctgctggcctagcacactgactgggcttggcttcacccccagtaccatatcaaggaagtgtggtggtttatacacatgttcccagcactccgcaggcattagcaggtatgtctcaggaagtttaaggccagcctggtctacagaggaagttccaggacagccaggactacacagagaaagcctgtctaggaaaaacaaaataaaaataaaaacaagaaatgtgtctacagagcaagctggagggcaatctgggatacatgagactctaaaaaagccaagtttagggctagagagatggctcagcgggtaagagcactgactgcccttcgaaggtcctgagttcaaatcctagccaccacatggtagctcacaaccatccgtaatgagatctaacaccctcttctggagtgtctaaagacagctacagcgtacttacatataataataaatctttaaaaaaaaaaaaagaaaacaagttcagggctggaaagatgactcaatagtttagactgcatattgctttctgagaacctgaatttggtttcccggctcacatgtggcgccctcttctggactctttaggcacctacacatacatgcacatacccaacacatacacaaaagtaaaaaaataagtcttaaaaagaaagaaaatctctacttcccaataattggaagagttcctgggtgacatcaaggacagaagcattcagtcatatcaggcaatgacaggcaggacagtggatctaacgtctagatctggcatcaccgatgtctgaggaatgaggaataaggattgagatattctgatgtgtcttccccagtacgcgtgcttacacacacacacacacacacacacacacacacacacacagtctccagccccaatccacctctgtctctttgggttctgggggcagcccaggtccacaggctgaccagcctccccaatcacctccggaagtgagacagcatattcgtcccagggaccagaacgggaagggcggccatttggccaggctggtttcctgtggggtttcccctacaaagagctcaaggctgcagccaaggccactcccatcctcacacacaccagaggtctgtgtctggcgtggagggggcattaccacgcaggtgtccaggagctgggacaccctgtactgactcttagtctcacagggagactcaaagggacagaagtcctggagctggagggcttgagaaacagggcggggggccttgggctgtggcatcccagtcagttaaattagcacacacagccttcaagccctcggcatccctggaggacccacagtgaaccccaagaaagaaccagggcagaggccctccggccgtccccaaccctgatcctcaaatactttccactctcgcgaagcagcgaggatcggaaaataccaagggctgcagtctccgcccagctccgcccccgccccagccaccagcgctcgctaatggcccactcttcccaggagctgggcggctgggttggggccaacccgacctgcggcacagatgcctgccctccacgtccgtccccacgcaggaaccagacaacccgcccgggttggggggcagggcataggcaagtgggtgggcctagtgcctagccgcgagtggagggggcgcaggaaggggtgagggagggctgaatcacttggtataaataggcaaagacgacagccacgtcccaccctcgctgcccgccagccacacagtccaacaaccagatcccccactctattccttaacattctgtttgcggtgctgggttcccctcaagccaatcagtgctcccagggtgaagttcatcccaggtcctggcctggcctgggactggagataggagcgctgacctccatcacccactgtcttctggaaggcttggctcactcccttaactccgcaaaacttccaggaaccagccaggcattgtgaggcgtctctgtcagtctaccattcaggaggctgagccaggaggactgccatgtgttcaagaccgcggtaggctatgaaatgagactgtgtctcgacccccaaagttgactgtgggtagagagtgcttggctattttgctggaagcatggagtcagcaggtcccatcttaaagcagaaacccttcatcatggtgcacacaagtaagcctagcattcaggaggtggaggcctaaggaccagttcaaggacatcctggactacttatccagttccaggccagcatggactacattacattagatcatgcctcaaaaacttttattaatagatcgataattattattattcccaggcccaaagcttagggttccagagccccaaatgtacacaggagacaaaagggaggtatcaccgggcatcccagatttgctcccccgagtccctcaaggcccatgtgcccatcctgccacccagccctgctctgcccagggccacagctcagtagccacacccagggtggcgccagttctagctccagcagcctgaggcaaggcgccgctcgagtgtgactcagccatgcccggcatgatgctgtccttccctacccaagaattctcacgcccacgccaccaccctcaatccttccccatggccagctaggaagacacacctccatgtccactgaggacattcaacacaggatatgaggagacctcagcaccctatgggagactagagagtgtgctctgttccactgcatctccaaaagttcccattcacagatggaaaaactgaggcggcagagacaatcccaggaatgtctacactctctccataaagacaaggccgcctgagctggagttggtggcccatgcccataaccctagcacttgagagttgcaggaaagagaatgcggagctcaagtccgccgttagtttcatggcaagtttgaggctagcccagactacaagaaaccctgtctctgtcaactaaacaggagacaaagatgtagctcaaagagtggagtgctcgcctggcatgcccagggccggagttcaatcaccaggactgtggaagccagggatggtgcagtactcaggtgcggagacaggaggatcagaaatttgaggctagcctgggttacaacagactcagaaaacaaaagtaactagcccgatgctgctatgggaacagggtaggtatggtgctgtatcttgtcatgccagcactcaggaagctgaggcaggagtgtcacagcgagtcctatgccaacctcagccacatcagctctaagttggcctgtgctccactgaacccctcctggtctcacacaggcctgttgcagggaagtgcagaaggacagggctagctggggcctgctgggaacatctgccctccacttacaacaggcatagggtggcccatggcatgggggtgcctcgtggggcatctgccttggctgcctttctccagcaagtaaaattctgccaagctcagaggccgggccagctcagacaggcccgaccccctggacacgccctgtcacgcacatgcgccgcgtgccagccctgggctgggcccacagctattttaaggccccctgctaggtcctcaagcaagggctgtccagtcgaggggtcttagggatgcacttggggaccccctcccccggcaaggacagagagctatgatgctcctcagggtatgggcccagtgaaggatcctcccttcccagcactgtggtggtgtgaacacatgtgcccaggctggcccaggcacagtgcgtgggtgagcggccagggtgagcccgcatcacctcgcctggaagcctgcgcacctgccgggcgtgccggctttgagctgggctggctggggcagcctcggggccagggtggtccagcccccagacttaccttctcaggccaccctgccagaggcgggcagctgctgctggctgggaaggggacaggtacagggagccaaggcacttcctagacactcaagtggtcagtggggcctggcaggctggaaggtcacgcacagctgaggggttcggtggcctgcgaatctagaggtcagcctggggctagcacaagacagcagcaggcctctcgtcaagaccaagggctgtggcctcggcgctgcaccacgccggggtcaggccttcggccccgtaagtctacctgctgtcgcccgcagccagatccagtgcttgcctcccgggacaggcggtcacggccccctctctgctccccgggccgcgcgggaaagttgtcgccgcccgcgccccgcgagtctctcccgagtcggaccccaattccccgcgggggaggggagccgggctgcgcgcgggcgagacgacgccggccgcgccccaccccgccggccggcccagatcgcctttaaaacctccgcgtctcctccccccacggccgggcagggggcgggcgcggggcggggcgggcgccgccgtcatgtgcccccgaggcggcccgccccacgctcactagtctgtcccccaactcaggcccaactttctccatatccggaatgggcatgggcctgggtactctggggggggtgggtcctgccaaacaggaatcttcacttctactgcaccttctccagtctaggaagtccctccttttatctcacccaatcccctcttgctgctgtggacaagactttctgattctaggctaggtgacccctgagtctgcgcccctcctctttccaggcttccgggcaccctcccccaaccacccaccggggacctctgggagactccacagttacgggtatatccctgagaaag

SEQ ID NO: 596 - DNA, 4259 bp, Mus musculus
agtcttaaaggggccgcgtcgtccgccggctcggccggatggagcccccgcggccaagcgcagccggggctgccccgcgggggacgagcccgggaccggggcccgtcgcagtcgccccgagccgttgttggaccttagcgccaagcgggtggccgagagctgggccttcgagcaggtggaggaaaggttctcccgggtgccggaaccggttcagaagcgcattgtgttctggtcttttccacgaagtgagcgggagatctgtatgtactcatcactgggctaccagcccccagaaggtgagcaggacacccgggtaccattcacccgtgggctgcacctgctacagagtggggctgtggatcgagtgctacaagtagggttccacctgagtgggaatattcgagaagttgggggcccaggagagccagagcatctctaccacgtctccatcagctttgaccgctgcaagatcacatctgtgagctgtggctgcgacaatcgggacctcttctactgtgcccacgtggtggcgctgtcattgtaccgcatccgtcatgctcgccaggtggagctgcggctgcccatctctgagactctgtcacaaatgaaccgggatcagcttcagaagtttgtgcagtatctcatcagtgcacaccacactgaggtgctgcctaccgcccaacgtcttgctgacgagatcctcctgctgggctctgagatcaacctggttcatggtgccccagatcccacagcgggtgcaggcacagaagatgccaactgctggcatctggatgaggagcagatccaagagcaggtgaaacagctgctgtccaatggtggccactatggggccagccagcagctgcgctccatgttcagcaaggtgcgggagatgcttcgagcacgggactccaatggggcacgcatgctaatcctcatgactgagcagttcctgcaggaccctcgcctggccctgtggcggcagcagggtgctggcatgacagacaagtgccggcagctgtgggatgagctgggggctttgtgggtctgtgtcattttgagcccacactgcaaaccagatgagcggtcgggatggctgcagctacttggcacatgggacaagctagatgtgtgcccactggaagaaggcaactattccttggacatccccaacctacagcctgctctaacctccaggacagaactgctccagaaaggtgctactggtgtcacaagcactgaaggttgggtgggccatcccctggatcccattggctgcctctgcagggcactgctggaggcctgtcgcctggaggaggagcctcactctcttttcccagactcagccccagagaagcgtaagctggcctaccagcacgtgctggtgccggggagccctggagagtcctacttggcactggcactggaagtggcactcctggggctagggcagcagcgggccctgccggagggactgtatgcccaggacaaagtggtgcgcaatgaagaacagctactggccctgctggaggaggtggagctggacgagcggctggtgcaagtgctgcgaaagcaggctgggctgctgctggaaggaggccctttcagcggctttggagaagtgattttccgggagagcgtacccatgcacacctgtgcccgatacttgttcactgcgctgctgccccacgacccagatctggccttccgcctggcgctccgagccatgaggctgcctgtgctggagacaacattccccgctggagaatctcaccccaacccactggactccatcatgagtaaccgcttcccccggtggttcatccttggccacctggagacccgccagtgtgagctggcctccaccatgctgacggctgccaaaggagataccaagtggctgcatgcggttctgggctccgtccagcaaaatatccactccccagccctgctcttcaagttggcacaggatgcctgcaagacagccactccagccagcgcaccgccagacaccgtgctgctgggcatcgcgctggagctcggcctgcaggtgatgcggatgacactgaacaccatgacttggcggcgcagggagatggttcgctggctggttagctgcgccacggagattggcccaccagcgctgatgagcatcatgaagaactggtactccttgttcaccccagtggaggcggtcaccatagtggcagtgacaggcaccacgcatgccactttgctgcgactgcagctagatacagctgggcgagaggagctctgggcttgtgcccgcaccttggcactgcagtgcgccatgaaggatccccagaactgcgccttgccagccctgaccctgtgtgagaagaaccacgcggcctttgaggctgcctaccagattgtgctggacgctgcagccggtggcctcggccacgcccacctcttcacggttgcacggtatatggagcatcgaggcctgcctctgcgggcctacaagctggccacgctagccttggcacaactcagcattgccttcaaccaagacagccaccctgcagtcaacgatgtgctgtgggcctgctccctcagccactcgctggggcggcacgaattgtcggccattgtccctctcatcatccgaagcatccactgtgcacccatgctctcagacatcctgcgacgctggacactctcagcacccgggctgggcccactgggggcccgcagggctaccaaaccactagggactgacagggcaccactttgtcagcttctggatgccgcagtagccgcgtacataaccaccagccactctcgcctcacccacattagcccacgccactatggtgacttcattgagttcctgggcaaagctcgagagaccttccttctggcaccagacgggcacctccagttcgcacagttcttagaaaacctgaaacagacgtacaagggaaagaagaagttgatgctgttggttcgggaacggtttggctgaggaactgcagaaagccgggagcatgggtgtcccaggcccaccttcctcaaacaggaggcccatggctacttgcagtaaagttacagaggtgggaggcagagggtgacatcattccaggtgtgtgcctaggagtgtgcagacaaacgggacatgcgatctgaggatccgaagccatactgctaactagaccctgcagggagtatgtgcctgggcacctcacaaggaagaagcaagctctggctcttccagactcccagggtcagctgggacttccaggagaagggctgggccagagtgaagttaggcctccaactcagtgcagcagatgctccagagccggagctggccggagcctaggcacttcacatcagggtagttacttcccactgtgtttctcccctctccacagctcagggctcctgtcccactgccctgcgcccccagtcccagctttccagcacaaatgcctcaccccactgaaggatattaagaggtcttgggcctctgccacatacctcacccccaaatacccttgtcaagccagggcctgtcctctcttgggcaccaaggtcacagggtaggctggggacagctctctgctggccagaccccaccactagtaactggatacacaactcaggagtcaggctgccctccagcctgttgtgggaggcacaggcagacagccagggaccccgttctgtcttcctcttgctctgcacctccatttgtttccccactcccttagtttccccatgtctgcatctctctcaagtcccagctgctgacaggccttcctttatcccaggccttggcccagggaggaggagaagggagagcctccaccccagacgcacctgtcttctcttgtatattaaggaaaaagttggcatcattttgtaactttttttcttatttattgaaccccatactgtattcttttcctttttttttcctttttttttaaaaaaaagattgaacacaacttctttttaacttcaagactgggttgcattgctaacacaaacacccggggccaggggtacctaccacctgctcaattaaccaaaaaattttccatctcggtttttgggcacaacttgaatgggacaggagaggctgctggtttcttcatggcatcgtggtgacacgaagagccacctcttgctggtggctttactgcttttccatctgcatgtcataatctctgcaagtcaggaggcttaaaacgcccaaacctagagtctgtaggtttttggaaaatgca

SEQ ID NO: 597 - protein, 982 aa, Mus musculus
VLKGPRRPPARPDGAPAAKRSRGCPAGDEPGTGARRSRPEPLLDLSAKRVAESWAFEQVEERFSRVPEPVQKRIVFWSFPRSEICMYSSLGYQPPEGEQDTRVPFTRGLHLLQSGAVDRVLQVGFHLSGNIREVGGPGEPEHLYHVSISFDRCKITSVSCGCDNRDLFYCAHVVSLYRIRHARQVELRLPISETLSQMNRDQLQKFVQYLISAHHTEVLPTAQRLADEILLLGSEINLVHGAPDPTAGAGTEDANCWHLDEEQIQEQVKQLLSNGGHYGASQQLRSMFSKVREMLRARDSNGARMLILMTEQFLQDPRLALWRQQGAGMTDKCRQLWDELGALWVCVILSPHCKPDERSGWLQLLGTWDKLDVCPLEEGNYSLDIPNLQPALTSRTELLQKGATGVTSTEGWVGHPLDPIGCLCRALLEACRLEEEPHSLFPDSAPEKRKLAYQHVLVPGSPGESYLALEVLGLGQQRALPEGAQDKVVRNEEQLLALLEEVELDERLVQVLRKQAGLLLEGGPFSGFGEVIFRESVPMHTCARYLFTALLPHDPDLAFRLALRAMRLPVLETTFPAGESHPNPLDSIMSNRFPRWFILGHLETRQCELASTMLTAAKGDTKWLHAVLGSVQQNIHSPALLFKLAQDACKTATPASAPPDTVLLGIALELGLQVMRMTLNTMTWRRREMVRWLVSCATEIGPPALMSIMKNWYSLFTPVEAVTIVAVTGTTHATLLRLQLDTAGREELWACARTLALQCAMKDPQNCALPALTLCEKNHAAFEAAYQIVLDAAAGGLGHAHLFTVARYMEHRGLPLRAYKLATLAQLSIAFNQDSHPAVNDVLWACSLSHSLGRHELSAIVPLIIRSIHCAPMLSDILRRWTLSAPGLGPLGARRATKPLGTDRAPLCQLLDAAVAAYITTSHSRLTHPRHYGDFIEFLGKARETFLLAPDGHLQFAQFLENLKQTYKGKKKLMLLVRERFG

SEQ ID NO: 598 - DNA, 51837 bp, Homo sapiens
  misc_feature (1)...(51837): n = A,T,C or G
tcgtctatagtcccagttactcgggaggctgaaacaggagaattgcttgaccctaggatgtggagcttgcagtgacctgagactcgccaccgcactccagcctgggcaacagagcaagactccatttcaaaataaataaataaactaataaataaataggccaggtgcagtggctcacgcctgtaatcccagcactttgggaggccgaggtgggtggatcacaacgtcaggagttcgagaccagcctggctaacacggtgaaacaccgtctctattaaaaatacaaaaaaattagcccggtgtggtggcacatgcctgtaaacccagctactcgggaggctgaggcaggagaatcacttaaacccgggaggcagaggttacagtgagccaagatcgcaccactgcactccagcctgggctacacagcaagactccatctcaaaaattaaaaaataaataaataaataaacatcaaataaatttttagaaatgggggaggggggtctcgctatattgcccagcctggtcttgaactcctggactcaagcaatcctcccacttcagcttccccaagtgctgggattacaggtgtgagccactgcacccggccatcctttgcttgaactcctccctgtgtctcctctgaccccagttactcactccccataagtctaaatcctatgcaaggagataccccagtaagtctagggctccaaagcagcccccagttgacttccactagtccagctcctactgctgggtgacctcaagcaagtggctcagcctctccaagcctcagtttcctcctctaagaaatggaagtgacagtccccactttgcaacactgtttgacggcttatacttcagcgtttatctccatagctacgggcattgcatgagcactcaacacattattattattgctatttctgttgctatcactgtggcaggctgtggtttctcaagacgggcactgtctaacagaaatacaactcaagccggatgtggtggctcacgcctgtaatcccagcaatctgggaggccgaggcggaaggattgcttgaactcaggaattcaagaccatgggcaacacaacaagacttcctctctatcaaaattcaaaaaaattggccaggcatgctggctcacacctgtaatcctcacactttgggaagcagaagcaggcaaatcacctgaggtcgggagttccagaccagcctgaccaacatggagaaaccccgtctctactaaaaatacaaaaattagaagggcatggtggcgggtgcctgtaatcccagctacttgggaggcgaggcaggagaatcgcttgaacccgggaggtggaggctgcggtgagccgagatcacgccattgcactccagcctgggcaacaaaagcgaaactccgtctcaaaaaaaaaaaaaaattaaccagggatggtggctcacgcctgtaatcccaggactttgggaggccaaggcaggtggatcacttgaagtcaggagttcgagaccagcctggccaacatggtaaaaccccatctctattaaaaatgcaaaaattggccgggtgtggtgacgcacacctatagtcccagctacttgggaggctgaggcaggagacttgcttgaacccaaggttcaagtgaggttgcagtgagccgagatcgcgccactgcactccagcctggtgacagagcgagactccggctcaaaaaaaaaaaaaacaaaaaacaaaaaaggaaaaaaagaaagaaatacaacttgagacacatatatacttttatttatttatttatttacttatttatttttgagatagcatctcactgtgttgcctagcccagtcacaaactcctggactcaagtgctgctctccgctcagcctcccaaagtgctgtgtttacagggaccaaccactgtgccctgccacatatgttattttattttattttactttatttatttattttatatatatatatattttttttttttgagatggagtctcactctttcacccaggctggagtgcagtggtgcgatgttggctcactgcaacctctgcctcccaggttcaagcgattctcctccctcagcctcccacgtagctgggattacaggcacgcaccaccatgcctggctaattttttgtatttttagtagagacaggtttcaccatgttggccaagctggtctttttttttttttttctttttttgagacggagtctcgttctgtcgcccaggctggagtgcaacactgtgatctcagcttacttcaacctccacctcccgggttcacgccattctcctgcctcagcctcccaagtagctgggattacaggcacccgccaccaggcccagctaattttttgtatttttagtagagacggggtttcactatgttggccaggctggtctcaaactcctgaccttgcgatccgccctcctcggcctcccaaagtgctgggattacaggagtgagccaccgcgccccgcctaagctggtcttaaactcctgacctcagatgatctgcccgcctcggccttccaaagtgctgggattacagccctgagccactgtacccagcctacatacgtaatttaaatgtcctgaaaccatgtaaaagaaaatatatgaaatcaattttaataatgtattttattaaaccaagtttatctaaaatataatttcaacatgttaacaacactaaacatttgctttcttttgttctgtctttttttttttttttttgagacagagtctcactttgttgcccaggctggagtgccgtggtgcaatcttggctcactgcaaactccgcctcctgggttcaagtgattctcctgcctcagcctcgcaagcagctgggattacaggcgcccgccaccacgcccagctgatttttgttttgttttgttttgttttgttttttgaggcggagtcttgctctattgcccaggctggagtgcagtggcgcgatctcagctcactgcaagctccacctcccgggttcacgccattctcctgcctcagcctccggagtagctgggactacaggtgcccgcccccacgccaggctaatttttttgtatttttaataaagacggggtttcaccgtgttaaccaggatggtctgcatctcctgacctcatgatccgcccgcctcggcctcccgaagtgctgggattacaggcgtgagccactgtgcccggccctaatttttgtatttttagtagagacggggtttcaccatgttggccaggctggtcttgaactccagacctcaggtgatccgcctgtctcagtcttcgaaagtgctgggattacaggtgtgagacaccttgcccggcctcgttttctgtttttttgtttgtttgtttgttttcctgagacggtcacactgtcactccggctggagcacagtgatacaatcatatctcactgtagcctgaacctcttgggctcgagagatcctcctgtcacagcctccagagtagctgggactactggcttgtgccaccacgcccagctgattttcttattttttaatagagatgggttttcgccatgttgcccatgctggtctcaaactcctgggctcaagtgatcttcccacctcaccatcccaaagtgctgggattccaggcgtgaaccaccgcgcctggccaaaacattcttttttttttttttttggagtctcactctgtcccccaggctggagtgcagtggcgcaatcttggctcactgcaacctctgcctcctgggttcccaccattctcctgccctagcctccctagtagctgggactataggcgcctgccaccatgcccggctaattttttgtatttttagtagagaaggggtttcactgtgttagccaggatggaaaacattcttaatgaaatattttaggccgggcgtggtggctcacgcctggaatcccagcactttgggaggccaaggcaggcagatcataaggtcaggagtttgagaccagcctgccaatatggtgaaaccccgtctctactaaaaatgcaaaagttagtcaggcgtggcggtgggtgcctgtagccccagctacttgggaggctgaggcagaataatcacgtgaacctgggaggcagaggttgcagtgagctgagatcactccatctcaaaaaaaaaaaaaagaaatatttttccttgttcccttcctgctatgtctccaaaatccactctgtattttacctttccagcacaacctaatttcagccagtcccatttcaagggctcagagaccacttgtggccattggtgaccatactggacagtgcaggtctgcaggggagtttaactaattgagggggtggcagggagagtgggtgaagactggccagagggtgcagctgtgagactcgaagtttctccaagaaaaagctagggcttccatatggatgagtggataatcactgttttttttttttttctgctgtgcctatcatttaactgaatggaggcaaagcatgtgttggttggtacattcaacaagttctaggttaagcgcctaccttccaggtgctgccggtacagtaaagcacagatgggacaaactcctgcctcctgaggctcacagtggagagggagagattgaaattaagcaactaccaaaggtggatcacttgaggtcaggagttcaagaccagcctggccaacatggcaaaactccgtctctaccaaaaatacaaaaattagccgggcgtggtggtgggcgcctataatttcagctattcgggaggctgaggcaggagaatcacttgaccccgggaggcgcaggttgcagtgagccgagatcgcaccactgcaccccagcctggacgacaagagtgaaactccgtaaaaaaaaaaaaaaaaaccgccgaaacagataaataaatggtaatggtgagaagtatgaggaaggaaaaatgcagggtcctctgaggacattggcaaggagccgggacgggaacgggtgatggaagccatggccagcttccaggccagagacggtggcctacacaagctgagtcagaaaaaatgctcagaggtgctggggtttgattaagtgttagggtgaacctcatggaattgccattttaacaggccaaaaatggtaaaaaaaaattagcaatttcatatgacccaagatagtatctagggcatggaaaggaggggcggggtactatactagttttgaggctcaagggatgacctatgaaccccctaaccgagctttgtttctggagagggggtccgcggcccgcatgagctccctcagtgagcctgcgacccctccgcccccacaagaaccaaaacttgacccggtgcccagagaggttgagtgagtttctcgggtcgcacagctgggagggacgaggggctgagccactgccaagggatcccgctgctctgtctcgctcaccggccgggctatgttgattgtcccctcgcggcgcccggaagcgaccctcagtaaacaaagccgtgtgtgggcgcagccccagaagcctggggcgcgcagtccagcccaagagaggcgggggaggaatgttgtgaatgaaccccgggcccgccccgaaactccgcataaggcctgggccgcgggggtcctcccactctgattggcctctggcgccccgtgattgacagcgcccctcgctgtgcgctctggttgggtaaacaagaaaagactggcatcgcagtcatcgagtgagcagcgaggcttggacacgggtctggcggcgcagccaatggcgggggagggccgaggaggccgagggggggccaatagggacaggcggtgggggcgggacgacggcggagctaaagcggcggctgaagcagcttcattgttgtgaagagtcttaaaggggccgcatcaccctgccggcccggcgcgggtcgggggtgggtgcggtaggggtccggggcggccgagcgcagaggacggacgggaaggagggcagggggcgcgggagccggcgaagcggagcgggcatcggaccgagccccccaaagaggccccgccccggccctggccccggccgggccggatggaaccccccgcggccaagcggagccggggctgccccgcgggacccgaggagcgcgatgccggggccggggccgcgcgtggccggggccggcccgaggcgctgctggacctcagcgccaagcgggtagccgagagctgggccttcgagcaggtgaccgcgggggaagggggcgggggcagggacgcacccccagcaccttccccacctgtcttctcctcccccacaatccccagactccagagctaacccaatcagagacaccccctgagattccacccccaggacccttaaccctgcctggaaacaccccctcatcctcctgtttctgtccttcaaacccagtaacccacccccatcccttctctgccatctctgcccctcagcgccccagatcccaaatcaggacacttccttcttctcctaccaaccccagatctctgagatctggcccccatggcccgcctacaaccctgggcacccctcttttcccgccttatcccccaacggtacccctcttttcccaccttatcccccaacggtacccctcttttcccaccttatcccccaacggtacccctcttttcctaccgcatctttattcgccaatcagggcaccccattcagtcttcaatcctctcttcggccccccgcttggggacaccctgtctccctccatcgtagcctctagagactcacactaccccattcctgctctccagatccctaccgtacaccccaagtaaataactcccccatctctccagattccagctcaagacaccccttttttccccattcattcctgccctcgagcctccagattccacctgttccttggggacccctctctactcctccagattcctctttcggggctgcccgtcttctcctggcttgccgcagggattactgaaatgccagggtccctcctcctccccacctcatccccctgacctatcctatctcttcccataggaaaacagcaggggcggagcctgggtggtggtccctggacaggtgcacctagaagctctcttctgtggcttctggtggcactgacaggatgtcccagagctggggccctttaagtcccctttttcagcttcagtgtgggcccccaaggaactggagacatggcccagacttgaacaggaagcacacacgggctctatcctctgtccagcttcagggggcgttctttcctgcccggcctctctggagttaggaagtcggcctggacggatgggtttgggccaagtgtggatgggcaggctctgattcatggactggaaaatccctccttagtcatttgccaactgtccctgaggcctgggctggtcattgcctctcccacttcccctagaaacccaggtggagtaggggctaaggagggccccttcattgcatgtgagacacacagaacaatctgaaaaccatctccgagcctcccacaaacctgccctggccaagccgagccctcagagttcttgacccacagaagctcatggaatcccctgcaaccctttggcagttgttcttgttcccactttgaggaaactggggcacagagaagttgagaaacttgcccaaggtcacccagccagggaatagcaagtccagattggaaggcaggctcagccagctcactgtattgcccagagcccacagcggtggccaggacaccccctcccctcctggggccccttcccagggatggggcatggaagggaaactgaggaacgacagagtctgtcttaggagttgaaacaactcacagctctgggaccctgaacaagtgaattcatcccactaagtctcagattctcccagctataaaacaggttcatgatttagtatcaatgtgccatcaagggtgttcaatcttttagcttccctaggccacactggaagaagaactgtcttgggccacatataaaatgcactaacactaacaatagctgatgagcttaaaaagaaaagaaaagaaaatctttgtatttatttatttatttatttatctgaaacgagtctcagtctgttgccaaggctggagtgcagtggcacgatctcggctcactgtagcctccacctcctgggttcaagcaattctcccgcctcagcctcctgagtagctgggactacaggtgtgagccgccatacccagctaatttttgtatatttagtagagatggggtttcaccatgttggccaggctggtttcaaactcctgacctcaagtgatcctcccaccttggcctccctcccaaagtgttggaattacaggcatgagccaccgcacccggacgtatcttataatgttttaagaaagcttacgaatttgtgttggcctgcattcaaagctctcctgggccagggccgtggggcgtgggttggacaagctcacactaggtggctgtgagaatttggaaattacatacataaagtgttcagcatagtgtgtgcattcttttcttttcttttcttttttcttttcttttgaggcagagccttgctcagtagcccagtgaaacaatgattgcgcaatgacacaatcataactcactgcagcctcaaactcctgggctcaagcaatcctcctgcctcagcctcttgagtagctgggattccagacgcccaccaccacacctggctaatttttaattctgtgtgtgtgtgtgtagacatggggtctcactatgttgctcacgctggtctggaacgcctgagctcaggcaatgctgccgcctcagcctcccaaagtgctgagattacaggtgtccagccaagatgggcaccttaatcattattatcacttttttctaacttcttcctgctccaccaaagcctggtgggtgggaagatctcacaacagaatcccaagaccctgcagctaggaggatccaggagggaaaccgcaagaaagttctagaatgctaactatgggccaggtgttattgtaagttctttaagctctttacatccatactgcatatttagtctccacaatcctcaagaggttggtgccgtggacctccccactttacacctgagaatactgaggccaagtgacttgcctggggtcacagtgctcctaaatagtaaagctaggattcaagcctcggtttctctgtttttttatttttatttatttatttgagacggagtctcgctccgtggcccagactggagtgcaatggcgcaatctcggctcactgcaacctccgcctcccgggttcaagtggttctcgcgcctcagcctcccaagtagctgagattataggtgcatgccaccacacctggctaatttttgtatttttagtagagacggggtttcgccatgttggccaggctgctctcgaactcctggactcaagtgcaccaactgccttggcctcccaaaatgctagaattgcaggcatgagccactgccctgacctattttttttgagatgggatcttgctctgttgcccaggctggagtgccgctggtgcaatcatggctcactgcagcctcaaactcatggcctcaagtgaccctcctgccccaccctcccaggtagctgggattccagatgcatgccaccatgcctggctaattttttttatttttttatttttttatcttttttttttttttttcgagatgcagtcttgctctgtcacccaggctggagtgcagtggcatgatctcagctcactgcagcctctgccttccaggttccagcgattttcctgcctcagcctcccgagcagctgggactacaggtgctcaccaccacacccggctaattttttttatctttagtagagatggggtttcatcatgttggccaggctggtcttgaactcctgacctcaggtgatctgcctgcctcggcctcccaaaaatcctgggattacaggcgtgagccatcgtgcccggccagtttttttgtaaagatgggagcctctctatgttgcccaggctggtctcgaactcttggcctcaagcgatcctccctcctaagcttcccaaagcgctgggattacatcaaccccaggctcctaacccactggcccttcctacaggtggaggagcggttctcccgggtgcctgagcccgtccagaagcgcatcgtgttttggtcgtttccacgcagtgaacgggaaatatgtatgtactcgtcgctgggttacccgcccccagagggcgagcacgatgcccgggtgccctttacccgcgggctgcacctgctccagagcggggccgtggaccgcgtgttgcaagtgggtgagtctttgtcccccactcctgctggggaggccaggaggtccataccaggcctggaaatgggggagttggagggaggcctggggccaggggatgggaggttacagacctcaggcttcgaggcccagataggattgtacaagattttttttttttttttttttttttttttgagacggagtctcgctctttggcccaggccggagtgcagtggcgcgatctcggctcactgcaagctccgcctcctgggttcacgccattctgcctcagcctcccgagtagctgggattacaggcgcccgccaccgcgcccagctaattttttggatttctttttttttttttttttttttttttttttttttttttttgagacggagtctcgctttttcgcccaggccggagtgcagtggcgcgatctcggctcactgcaagctccgcctcccgggttcacgccattctcctgcctcagcctcccaagtagccgggactacaggcgcccgccaccaagcccggctaattttttgtatttttagtagagacggggtttcaccatgttagccaggatggtctcgatctcctgacctcgtgatccacccgcctcggcctcccaaagtgctgggattacaggcgtgagccaccgctcccggccccattttttgtattttgtatttttagtagagatggggttttactgtgttagccgggatggtctcgatctcctgacctcgtgatccccccacctcggcctcccaaagtcctgggattacaggcatgagccaccacacccagcctgtacacgatgttttgagcaaaagctcaaggatcaccctagaacccaggcagtggggtttagacaaggggttgggggagaggatggtgaaccagaaacgggggaggagagatcccagaacttacacatcagagcccatgtaaaggaggggtgaggccagatgtggtggttcacacctgtgatctcaacactttgggaggccaaggcaggaagatcacttgaggccaagagttcaagaccagcctgggcaacacaatgagaccttgtcttcacaaaaaaatcaaaaaatgagctgggcatggtggcgggtgcctgtggtcccaggtacatgggaggccaaggcaggaggatcacttttgcccgagaggtcgagcctgcagtaagctatgattgcaccaccgtactccagcctgggttacagagcgagatgctatctcaaagagaaaaaagaaaaaaaaaaaaaaaggaagagaggtgagggccactctagggacaagggtagaggttgagacatggtggtgaaggtgccagacctcaggcttcaggtccagatggggttgggttcgggattatgagctgaaggtggaaagtgctcctagagccctagacctcaggctgctgagctggggaatggggaatgaagtagtgagacggagagaagagcaggtcccagctgaggatcagagaagcagctgtcagccagcagtgagaggaggctccagacctcgggctgagggacccagtgatgctttgggccaggggtttagagccagaggtaagaatgatcctagacctcgggcagtggggcccacgtgggagttggacacaaagatttagagccacaggtgagagtcttagacctcaggcagagaggctgggatttcaaaggcttagagctattgttgagcaatggtcttagacctaaggcaacagggctgaggtgggaatgtagagtagaagtttagaattcttttttttttttttttcgagatggagtacttgctactgttgcccaggctggagtgcagtggcannnnnnnnnnnnnnnnnnnnnnnnnnnnnnnnnnnnnnnnnnnnnnnnnnnnnnnnnnnnnnnnnnnnnnnnnnnnnnnnnnnnnnnnnnnnnnnnnnnnnnnnnnnnnnnnnnnnnnnnnnnnnnnnnnnnnnnnnnnnnnnnnnnnnnnnnnnnnnnnnnnnnnnnnnnnnnnnnnnnnnnnacacacacacacacacacacacacacacacaccacacacccttttgttcattctacaaacattgagtgcctgctatatgtatgtcaggctctgttccgggcatttggggacacagaagagaacaaaacagaaaaaaaaatccctgtacttttgggaccagcatctatgggagaaacaaacatgataagcagatagataggtataaagatatataatgtggccaggagcggtggctcatgcctgtcttcccagcactttggggaggctgaggcagcctgatcacttgaggtcgggagttcgagacaagcctggccaacatggtgaaaccccgtctctactaaagatacaaaaattagccaggtgtggtggcacatgcctgtaatcccagctacttgagaggctgaggcaggagaatcagttgaacccgggaggcagaggttgcagtgagccaagatcatgtcattgctctccagcctgggcaagagagagagactctgtctcaaaagaaaaaaaaaagggagatagggtctcactctgttgcccaggctggagtgcagtggcgcgataatagctcactgcagccacaaacatctgagctcaagtgatcctcccacctcagcctcccaagtagttggtaccacaggcgcaggccaccacacttgactagtttttaagttttttgtagagacctggtctcactctgttgcccaggctggtctcgaactcctgggctcaagagatcctcctgccacagcctcccaaagcactgggattacaggcgtgacccaccatgcctggccaagtatcaggttaagatcagctgtgaagggtgggctcagacctcaagctaagaaaacaaaagggctgcagagactgggagagatgtaatgagaatagtggaaaggccttggatctcaggcagccagactcagaaagggaccagtagaggctgagccagaaaacaaaagtgaggcctgggactccagacctctggctgcagcaggccatttctcccagctagaggtcggggctgggctgatatgatgccccgtcggctctatctgctttggagcccctttgctgggacatggccccgctgaccacgggctccttgccacctccagctggtatgaggaagccatctccctgcatgacccaggctgggcctgagctgccgaaccagtcagatgagcctggcacctgggctgcccagggaggggcagggggagtgaaggggacacctggcccctggcttacttcatcagcccctcgccccaagcgccacgggtctttggcattttctcaggaaattgaggggctcctgaagccctggccatattcattgtaacccaaggaatcagaaaaccaccttcaatgtcatggtatgatactattcataattaaaataagagcaagtgttgggctgggctcggtggctagcgcctataatcccagcactttgggaggccgaggcgggtggatcactaggtcaggagttcaagactactgctcactagcctggccaatatggtgaaacctgatctctactaaaaatacaaaagattagccgggcatggtggtgcacgcctgtaatcccagctacacaggaagctgaggtaggagaatcgcttgaacccaggaggcggaggttgcagtgagtcaagatagcgccactgcactccagcctgggtgacagagcaagactctgtctcagaaaaaaaaaaaaaaaaaagcaagtgtttacttaggacttaacttcataccaacagcgttctaagcctttttttgagacagagtctcattctgttacccaggctggagtgcaatggtgcgatctcagctcactgcaacctctgcctcccgggttcaagccattctcctgcctcagcctcctgagtagctgggattacaggcgcccgccaccatgcccggctaatttttttatatttttagtagagacagggtttcaccatgttggccatgctggtcttgaactccggacctcaggtgatctaccagcctcggcctcccaaagtgctgggattacaggcatgagccactgcgccgggctgtctcttctaaaaatacaaaaattaggactgggcaccgtggcccacgcctgtaatccctgcactttgggaggctgaggcaggcggatcacctgaggccaggagttcaaaatcagcctgaccaacatggagaaaccccatctctactaaaaatacaaaattagccgggcatggtggcgcatgcctgtaatcccagctactcgggaagctgaggcaggagaatcacttgaacctgggaggtggaggttgcggtgagccgagatcacaccattgcactcctgcctgggcaacagagcaaagctctgtcccaaataaataaataaataaataaataaaattagccgggcatggtggtgtgtgcctgtaatcccagttacttgggaggctgaagcaggagaatcgcttgaacctgggaggcggaggttgcagtgagcccaggtcgcagcactacactccagcctgggccacagagcgagattttgtttcaaaaaaaaaaaaaatgcaaagtgagtgaggtgacttgtgctagtgaagtgactcggctgggctttgcaaccgggtcttgctgtgtaccacaaacaccgcctgtctctgggatgacacggatgcgacagtttggctttgatcctaggattccacctgagcggaaacatccgcgagccagggagtcctggagagcccgagcgcctctaccatgtctccatcagctttgatcgctgcaagatcacgtccgtgagctgcggctgtgacaaccgcgacctcttctactgtgcccacgtggtggccctgtccctgtaccgcattcggcacgcccaccaggtggagctgcggctgcccatctccgagacgctctcccagatgaaccgggaccagctgcagaagttcgtgcagtacctcatcagcgcccatcacactgaggtgctgcccactgctcagcgcttggctgatgagatcctcctgctgggctccgagatcaacttggtgaatggtaagggcaccccgggggtccggtggggagaggatgcccaagcgcacagccacgccacttgctgtgtgcccagtgctggtcacttactgacagaaagttgtgggggcggggggcggaaaacgcgccatggcctgcatcatctgaggtcacccacctggtgagtggcagatcccagatatctggacacaggacagatgagtagttgcaaatcagcctacgggcagagggcgagggcaggaggggagatcctgcgttagagggcaagtgggaggtctggccccagggctgggtatgtcaatagatggagcatcctgggtatgggaggagaagagggggcgtgaagggaatgtgggacgtttgtgggtgtcagaggtgttatgggtgaggggatacaccaggaggcgtggtgagggctgggagggtttggggggctccgaggggcttgggttgcctagctaggatggggaaggtgagtagtaggtggaggcatggatggatgatggagggaggtgctgggtgggtacagaaagtgttcgtgattggctgggcgcaggggctcacacctgtaatcccagcactttgggaggccgaggtgggcggatcagttgaggtcaggagttcaagaccagcctggacaacatggcaaaaccccatctctaccaaaatataaaaattagccgggcgtggtggtgggtgcctgtagtcccagccactcaggaagctgaggtgggagaatgggttgaacccgggaggcagaggttgcagtgagctgagatcgcactgttgcactcgatcctgggtgacagagggagactctctctcaaaaaagaaaaaaaaaagacagctgtatgaaaggtggctgtctccctccctctccaggtgaatctgggctggaggctgcctttagggcagactgtggtggcagggacggtgccctcctggtctagcccttaaagtnnnnnnnnnnnnnnnnnnnnggcaactgatggtgtggaaaaacgaatgggtgggtgggggatatttttttttttgagatggagtcttcctctgtcacccaagctggagtgcagtggtgcaatctcagctcactgcaacctctgcctcctgggttcaagcaattctcctgtctcagcctcctgagtagctgggattacagatgcacaccatcatgcccggctaatttttgtatttttgtagagacaggggtttcaccatgttggccaggctggtcttgaacttctgacctcaggtgatccacctgcctcagcctcccaaagtcctgggattacaggtgtgagccaccacacccagcctggacgggatattaacaatgccgttaggtgaatgggaattggaagctgagtgtggtggctcatacctataatcccagcatttgggaggctgaggaaggaggatcactcgagaccagcagttcaagaccggcctgggcaaaatagggagacctcctctctacaaaaaataaacaaaagtagttgggcatgatggcacacacacgcctgtagatacttgggaagctgagatgggaggatcatgagcgtgggaggtaaaggctgcagtcagctatgatcgtgctactacactccaacctgatgacagactgagaccctgactcaaaaaacaaaaaaaaaaaaagaagggaaggacagaactggtggtgattggaggtgaggatgagtggttgggtggggagggctttgactagtggagttaaggtagactgacagtggtggacagatgaagttagtgaaagaatgaaagatccaatgggtacatgcattgggagtgagttgatgggtgaatggaaggaaggttcacatatgtggatcaacatcgtgggtgggcagagtgggtgggcgctttgtgtagggtggatggatggacgaatggggtagtgggtgttttgagaggtacatatgaatggatggtttgataatgaatgggtggtttaatggaagcatagagagttaggattagttattgggtgataactaatagttatcacctagataactagggttagttattggatgatagttactgggtggggtggatagtgtacttgtgtgggtcaatggacaaatgggcgggtgggtattttgagtggttagttcacgtggattggaaagataaaaggggtgagtgggcagatagatcaataagatgagtatatagatgggtggatgggtgggaattatgggtagggtggatgatggacccatgatggggtaggtggttgtttaaagggtatggacatgtggatgaagtgaaatgggggatatggccaggtagatagaggctggcatgacttgggtgggggtggataagtgggttgtgtttcaggtgagacagatgagtaaacagatgggtcggtggtgttttgagtgggatgggtaaatggatgagtggatgggtagatggatagatgtgtagtgtttcaggagagatagatgaatggattggatgggtaagtaaatggatgaatgaacaaatggatgaatgagctcctggtgttttgggcaagatggatggatggatggatggatggatggatggatggatggatggatggatgaatattactacaggggagatagatggattggatggatgactcagtggataaatgagcaaatggatgagctggtggcgttttggacaagatggatggatgcatggatggatggacagatggatgcatggatggatgcatggatggatggatggatggatggatggatggatggatgggtgtatgggtgtatgggtgtgttgtgtttcaggtaagatagatgaatggattggatgggtgatgtattactctgttctcacactgctataaagacatacctgaaacaggttaatttaaaggaaacaggtttaatcggctcatagttctgcaagctacacaggcttctgcatttggggaggcctcaggaaacttacaatcatggcggaaggtgaaggagaagcaaacacatcttcacatggctgtcaggagagagagagcgaagggggagacactacacactttcaaacaaccagatctcatgagaactctatcatgagacaacactaagggaatggtgctacaccattagaaaccatccccatgatccagtcacctccctccatgccccacttccaactctggggatcataattcaacatgagatttgggtggagacacagagccaaaccatatcagatgactaagtggatgaatgagaaaatggatgcatgagctagtcatgtttaggacaagatagatggattgatggagggatggatggatggataaacatgaatagatggtcgggtgggatggacaagcagatgggtgggtggggtttaggtgggatggatggaactttagactgggttgggtgacttggaagaatggatggatgggtcgggcacagtagcttatgcctgtaatcccagcactttgggaggccaaggcgggtggatcacctgaggtcaggagtttgagaccagcctgaccaacatggtgaaatcccgcctgtactaaaaatacaaaaaaaattggcaaagtgtagtggggcgtgcctgtaatcccagctacttgggaggctaaggcaggagaatcacttgaacccgggaggcagaggttgtagtgagcgaagatcgtgctacagcactccagcctgggcaagaagagccaaactccgtctccaaaaaaaaaaaaaaaaaaaaaggacagctctcctcaacccaacccaaccccaactccagccccagcctcagcttcctttccctccctcccggcaggtgccccagaccccaccgccggcgcaggaatcgaggacgccaactgctggcacctggacgaggagcagatccaggagcaggtgaagcagctactgtccaatggcggctactacggggccagccagcagctgcgctccatgttcagcaaggtgccgtgcgggccggcggggcgcggggtgcagaaggccccggcggacgccccagcccttcctcaccaccctgtccccggcacaggtgcgggagatgctgcgaatgcgggactccaacggggcgcgcatgctgattctcatgaccgagcagttcctgcaggacacgcgcctggccctgtggcggcagcagggcgcgggcatgacggacaagtgccggcagctctgggatgagctgggtgaggcccaaaccccggtgcgtggtggacaccgggacttcggctcccatgggggctggcccactccaagattagggtctgttccctgaatccgccctccattcgtttggcaaacatttatgagcgcctctaaagtgccaggcatggtactgggcactggtggtccggcagagaacaagagagtcaaaatcctgttcacgtggatctgacaggaggcacaggcaatcaaatgtcattggcccaggggttgatacacacgtacacacgttttctttgttttgagacagggtatcactctgttgcccaggctggcgtgcagtggcacaatctcggctgactgcaacctctgcctcccggactcaagtgatcctacacctcagcctcccaagtagctgggtctacaggtgcacactaccacatccagctaatttttaattttttgaagagacagagtctcactatcttgccaagtctggtcttgaactcctggactcaagcagtcctctcacccagcctcccaaagtactgagatgacatgcatgagccaccacacccagcctacatgttttgtttctttttttctttttttagagacaggatctcactgtgcgcccaggctgaagtacagtggcacagtcacggctcactgtaacttcaaactcttgggctcaagtgatcctctggccttggcctctcaaagtgctgggatgacaggcatgagccactgtaccaagctgacatatttttgtttgtttgttttcttttcttttctttttttttttttgagaaggagtctcgctctgtcatccaggctggagtgctggagtgcagtggtactatcttggctcactgcaagctccgccctccgggttcacaccattctcctgcctcagcctccctagtagctgggactacaggcacccgccactaagtccggctaattttttgtattttttttattagagacggggtttcactgtgttaggcagggttgtcttgatctcctgaccttgtgatctacccgcctcagcctcccagagtgctgggattacaggtgtgagccacggcacctggcctgttttctttttttgacacggactctcaccctgtctcccaggctggagtgcagtggcacgatctcggctcactgcaacctccacctcctgggttcaaatgattctcctgccttagccttctcagtagctgggattataggtgcgtgccaccatgcctagctaattattgtatttttagtagagacggagtttcaccatgttgatcaggctggtctcgaactcctgtcttcgtgatccacccgcctcagcctcccaaagtgctgggattacaggcgtgagccaccacacccagccaacatatgttttcttttttcttttttcttttttttttgagacggagtcttgctctgtcacccaagctggagtgcagtggcacaatctcagctcactgcaagctctgcctcctgggttcatgccattctcctgcctcagcctcccgagtagctgggactacagaggcccaccaccacgcccggctaatttttttgtatttttagtagcaacggggtttcactgggttaaccaggatggtctcgatcccctgacctcatgatccgcccgcctcggcttcccaaagggttgggattacaggcgtgagccaccacgcccagccttttttttttttttttttttttttgagatggagtcttgctttgtcacccaggctgtagtgcagtggcacgatctcggctcactgcaagctccgccccccaggttcacgctgttctcctgcctcagcctcccgagtagctgggatcacaggcgcctgccaccacgcccggctaattttttgtatttttagtagagatggggtttcaccgtgttagccaggatggtctcgatctcctgacctcgtgatccgcctgcctaggcctcccaaagtgctgggattacaggcatgagccaccgcaccggccaacatgtgttttctgtaagagacacagagttaatgttattcagccctgcaggccatctggtctctgtcatgaagacctcactctgtctattatagtaaaaaaggcagacacagacatatataccaaacgggcatggtagcatttcaataaaactttatttaagagctgggaggccaggtgcagtggctcacacctgtaatcccagcactttgcggggctgaggtagggggatcacttgggccccggaggttgaggctgcagtgagccatgatcacaccactgcactccagcccgggcaacagagcaagaccctgtctcaacaacaacaaaaaaaggcgcttggcacagtggcaggagcctgtactccctactacttggaaggctgagtgaggcaggaggattgcttgagcccaggagttcgagtgcagcttagacgacatgatgagaccctgtctctaaattttttaaaaaccggctttatttatagatacttactaatttatttgaattttatattattcccacaagttgcaaaatattcttttggttgtatttccctgaccatttaaaactggaaaaataggccgggtgcagtggctcacaccttaattccagcagtttgggaggccgaggtgggcagatcacttgaggtcaggagatcgagaccagcttggccaacatggtgaaaccccgcctttactaaaaatgcaaaaattagccaggcattgtggcggacgcctgtaatcccagctacttgggaggctgaggcaggagaatcgcttgaacccaggaggtggaggttacagtgagctgagattgcgccactgcactccagcctgggtgacagagtgagactctgtctcaaaaaataaataaataaaaacaagtacaaataaaaagggaaaaataaatcttagcgtgcaggctaatcaaaaataaagggtggttcagttttcaccatgggcagtggtttgctagttcgcagacccctgcatgagatggtgataaatgctacccaaaaaaccccaaaacaccttgagaggagtctggaggcctggtttttttgtttgtttgtttttgtttttgttttgttttgttttgagatcgagtctcactctgttgcccaggctggagtacagtggtgtgatctcggctcactgcaacctctgcctcctgggttgaagcgattcttgtgcctcagcctcccaagtagctaggactacagaggcccgggatgtaatcccaacttttttttttttttttttgagatggagttttgctctttttacccaggctggagtgcagtggtgtgatctcagctccctgcaacctccacctcccgggttcgagccattctcctgcctcagcctcctgaatagctgggattacaggcacccacaatcatgcctggctttttttttttttttttggtattttcagtagagacagggcttcaccctgttggccaggctgttcttaaactcctgacctcaggtgatccgcctgcctcagccttccagagtgctgggattacaggcgtgagtcatcacgcctgaccctctaatcccaacttctaacttaccagcggtgtgaccctgtgcaagccgtgttatgtctctgtgcctcagtttgcttgtctgtaaggtgcaaaggctgcgagttgcaacttccgagggtcgaggtgaggggttagcagatcatcaggtggcacacagtgggcactgcggaagtgtgtgttgctgccactgttggcaggaatattgagcctgccccgtgcctcctcaggggccctgtgggtttgcgtcgtcctgagcccccactgcaaaccagaggaaagggcaggctggctccagctactcagcaggtgggacaagctcgacgtctgcccactggaagagggcaactactccttcgacggccccagcctgcagcccaccatggcccccgccccaggtaggagagaggggtctttaccatgccccccaaaaaccatcaccactaactgtggccccacttaccatcatggtcctcttcccaggagagagagggagtggggcagagcaaagcagaccccagtccttggctgttcttccaggactaatcccaacttgtctagccaggaaagagcgagtgccaagggcaggagcaatggcagcccaagtgggcaagtgaagtaaaatgcttaaaacacctgcagtcctgggctggtctggcttggccttctgctagctatgggaccaaagagaggatgagagaggaaaaaaggaggaatcaaacagaaggggaaagtgagatattgaggagagagaaacaagtgaagagaggcagagatggatggagagagggagaggcagacagaggagcagataggaaggaagacagagagagattgaggagagagggaaaaaaaaatttatagcaagtacaggccaggcatggtgtctcacgcctgtaatcccagcactttgggaagctgaggggggcagattgcttgaggccaggagttcaagaccagccagagtaacatggtgagaccttgtctctacaaaaaatacaaaaattagctgggtgttgtgacgcacacctggaatcccggatactcagggggctgagatgggagaatcgcttgagcctgggaggcggaggttgcagtgagccaagatcgcaccactgcactctagcctggacgacagagtgagaccctgtctcaaaaaaaaaaaaaaagaaagaaagaaagaaaagaaaaatagcaagtaggaagaggaagacagacagccagttagttgctcaacctcagtttcctatcaatgtgatgggcctgtactagctcctaacacatacacgcatccttttttttttttttttgagacagtctcactctgatgcccaggctggagtgcagtgacgcaaccttggctcactgcaacctctgcctcctgggttcaagcgattctcattcctcagcctcccaagtagctgggattacaggtgtgcaccaccacgccagggttaattttagtagagatggggtgtcgccatgttggccaggctggtctcgaactcctggcctcatgtgatcctcccaccttggcctcccaaagtgctgggattacaagtgtaagccaccatgcccagcctacacatgcatctttgaagggtggcttcaaggactgggcagatgatgtatgcccatagctttgcccaggcctaaaccccagttagtacttggtgggaaaagctggacacggctcaactgctatagggaccccccctcactgagccatgttgggtgcctctctgcaggctcggaggaagaggaagaggtggcagccacaagtccccgccacacggtatttggccgcgccttgctggctggagagctacactggaatgacgcctacctgcagaggatcctggccagtgactcctacgggcccagcctcacaggcagcgtgggtggggacaaaccgactttcgacccccagggccgcccactgtggctgggagaacctttccccactgcctgtgcccgtgtggacaccctgcgtgcccacggatacccccgccaggccctgcggctggcaagtgccatcatcaacacactccggctgcagcagcggcatcagctagagagctacaagcagcagaaaaaaggtcagcctcagccgggcacgggggctcgcacctgtgatcccagcacattgggagtccgaggtgggaggattgcttgaggccaggagttcaacatcagcctgggcaacatagtgagacaatgtctctacaaaaattaaaaaaaaaaaattagctggatgtggtggctcacacctgtagtcccagctactctgtaggctgaggcaggaggatcacttgagcccaggagttcaaggctgcagtgagctataattatgccactgcactctagcctgggtgacagagcaagacctcatctctttttttttttgagacagagtttcgctcttgttgcccaggttggagtgcaatggagcaatctcggctcaccgcaacctccacctcccaggttcaagggattctcctgcctcagcctcccaagtagctgggattacaggcatgcgccaccatgcccggctaatttttttgtatttttagtagagatggggtttctccattggtgagactggtctcgaactcccaacctcaggtgatctgcctgccttggcctcccaaagtgctgggattacaggcttgagccaccgtgcctggaaattttttttttttttttttttttttttttttttgagatggagtctcggtctttcgcccagtctggagtgcagtggcgcaatctcagcttactgcaacctctgcctcccaggttcaagcaattctccggcctcagcctcctgagtagcttgggactacaggcacccaccaccacacccagttaatttttgtgtttttagtagagatggggtttcactatgttggccaggctcttctcgaactcctgaccttttgatccacccacctcagcctcccaaagtgctgggattacaggtgtaagccaccgtgcctggcctactgaaaatatttttaaaattagccaggcgtggtggcgcacacctgtatttccagctactagggaggctgcggcatgagaattgctttaatctgggaggcagaggttggttgcagtgagccaagattacaccactgcactctagactgggtgacagagcgagactccgtctcaaaaaattaaaaaaaaaaaaagagagagagaggagagcgaggagagagagaagaggaaagaaagaggtggggagggagggacagagagagatggggggagagagaggggaaggaaggaagggagggagggaaggaggctgtatgagccccaaaaaccacattgtgtactagatatgggggtgggggacaggagggaggccaccagttgagagagctagtcgatggggttgatggatcagctatcaggaaattgaacgaagaaaagtgtgtcgtggaggaaacatgggggccctgggacccgagcagagctctgaccaggcttggcagcatcagtgaaaggcccctagattttaaaaattagccaggtggctaattagctgagtatttaaggatgtgcatggccaggcacagtggctcacacctgtaatcccaacactttgggaggtggaggcaggtggagtgcctgaggtcaggagttcaaaaccagcctggccaacatagtgaaaccccatctctactaaaaatccaaaacaaattagccaggtgtggtggcacgtacctgtattcccagctactcaggacactgaggcaggagaatcccttgaaccgggaggtacctggaggttgtggtgagctgagatcacgccattgcactctagtctgggcaacaagagcaaaactccatctcagaaaaaatttaaaaaaagaaaaaggatgtgcaggagttacccaggagaaggggatggaggaagtgctcagaatagaaggaacaccatgagcagcagccaggagggaagagagtacgtggcttggaggacgaggctggaggattggcctccagatgaggcaggtcaccagtatatggaaaaacttcatactggtccttgggggccctaaaggctgttggggctttatcttcagagaggtggagagggaataagggcaatgaggaggggaatgacacttcgggtgttttagaaagcgtccagtggccaggcatggtggcccatgcctgtaatccctttgggaggccgaagcaggaggatcgcttgagctccagaggctgcagtgagctatgattgggccactgcactccagcctgggcaataagcgagaccccacctcaaaaaaaaaagttgaaggtgaccattgggtgagcaggtggtgggcattatggggctaggctggctggcaggtcaagaagaggaatatccctccctcctagagacttgggcaggtgtgtgggcattgagccccctctttccacctgcagagctgctccagaagggctccacctgcatcaccaacaccgaaggatgggtggggcaccccctggaccccattggctgcctctgcagggcgctcctggaggcctgtcgtctggaggaggagacacttaccctttacccaggtactcacatggggtactcttggaggaggtgggacaaccccgcctcgttggccacgccccctggcccagtacccctataaggtaactcccagactctgacccttggccacgcccctacccttggctacctcctctggccagtgcccagagccaataggcttagcttctcctgaaagtgaggccaccataggcctagctgctgctagaaggtggggctcccgcgctcccccaaccccgtgagtgctgggagcttctgggctccctctaaagcctaccctgcgcccaggtctccatgcttgaggccaagggctacagggaccttagggaaggggatccgtctccagcagccctggccctgtctcccccagactcaggccccgagaagcggaaggtggcctaccagcacgtgcctgtgcccgggagccctggggagtcctacttggtgctggcgctggaggtggcactgctggggctggggcagcagcgggccctgccggaggggctgtacgcccaggacaaggtggtgcgcaacgaggagcagctgctggccctgctggaggaggtggagttggatgagcggttggtgcaggtgctgcgcaagcaggcggggctgctgctggaaggtgaggccgcgcccctaggcctggctgttgctgaagggtagggtccagcccctggtcctgtagcggcccggttgctgccagatgggaggccccgccccagccccgcccctagccccgcctcctggtgatactgtcccctcataccttggcagtttctaaaaggagagagccagctctttttcccgccacctagtgcgtgctgccagccagcaactgctgcgtgtgctgaggcgccgcccccttccctcccgggagccagtgagccaagtggttgatgttaaagcgagggcgtcccaccttcatccgcaacttagacaccgcccctgtcccggcctgctcctcattggccccgccaatggccaggccctattgacctgtgtgttgtgagactccgtcccctagcgctacagggagccgtttatccctgccccttcaaggccccctacgctatcggacttgctggtcttggccgctggtcccgttccccaaggcaggtgcagccccacctccaccctctggccccaccttgtatctgagtcctgctcctcacctgcgagtgtgcctggagtctcttcttttccttttccttttttccttttttattttgcgacagtcttcactctgtcacccaggctggagtgcagtggcgcgatctcggctcactgcaatctctgcctcccgggttcaagtgattcttctgcctcagcctcccgagtagctgggattacaggcgtgcgccaccacacccggctgatttttgtatttttagtagagatggggtttccccatgttggccaggctggtctcaaactcctgacctcaagtgatccgcccgcctcggcctcccaaagtgctgggattacaggcatgagccgtggtcccctgcctcctctttttttttttttgagacggagtctcgctctgtctcccaggttggagtgcagtggcgcaatctcggctcactgcaccctccgatcccgggttcacgccattctcctgcctcagcctcccgagtagctgggactacttgcgcctgccaccacacctggctaattttttttgtatttttagtagagacggggtttcaccgtgttagccaggatggtctcgaactcctaacctcgtgatccgccagcctcggcctcccaaagtgctgggattacaggcgtgagccaccgcgccaggcctcctcttttatttggattacccagagattgcctcagtctcagacctgaacccctaccccagagacccatctagccacagccactctacccaggggccagcccaccctctacttaaagcctggggtctagtgagacctggggaagggcagaggcgagcccacacttggggactgagctcaggctgttcctgcagggggtcccttcagtggctttggggaggtgctgttccgggagagcgtgcccatgcacacctgtgcccgctacctgttcaccgcactgctgcctcatgacccggacctggcctatcgcctcgcgctgcgagctatgaggtgaggataggtggccaaggcagtggcagggggagctggggggaagaggggcgggcatggggggtagctcagagccccacccatccagcctgaactcacagcctagttaattcagtctctctcaccctggcatttgatgatgccatgtgcttttcattattattatttatttatttatttatttatttatttattttgagctggagtcctctgtgacccaggctggagtgcagtggcgcgatctcagctcactgcaacctccacctcctgggttcaagcaatttcctgcctcagcctcccgagtggctaggattacaggcatgcaccaccatgcccagctaatttttgttttttgttttttttttttttgagacggagtcttgctctgtcacccaggctggagtgcagtggcgcgatctcggcccactcccagggccgatctcagctccgccttccaggttcacaccattctcctgcctcagcctcctgagtagctgggaccacaggcgcccgccaccacgcccggctaattttttgtatttttagtagagacggggtttcaccgtgttagtaatttttgtatttttaatagagacaggatttcgccatgttgcccatgttgtctcgaactcctgacctcatgatccacccgccttggcctcccaaagtgctaggattacaggcataagccacctcgcacagccgtgctttttattattaagtataaatgtgtgttttttgttttgtgttttttttgttttgagacagggtctggctctgtcacccaggccagagtaaagtggtgccatctctgctcagtgcaacctctgcctcccaggctcaagcgatcctcccatctcagcctcctgagtatccaggactccaggcgtgcaccaccgcactgggctaatttttgtattttttgtagagacggggtttcaccatgttgctcaggctggtctcgaatttctgagctcaagtgatccgcccaccttggctttccaaagctctgggattacaggcgtgagccactgcacctggctaaatgtgtaatattattttgagtttgagaatattcacatgatacatgaaaagatacacaaagctgaaatcttttctaggcagttttatctcagcctatccagatctctccggatgcaagcagggttatcacttttgtgtctatcctgcaagaattgaggtttctgcaaacccataatctggaaattgaacgttgatcctccttttataccagtggtacatcctgtatctattctttgcacctttttctcactgagctttgcatcttacaggatttgtcttatcacacagtacgtgaatcactgcgtagccttccactctaaggacacgtcataaaagaaccagttggaagctgatagacatttacgcaatttccaaaaaaaaaaaaaaaaggcaatgaataacctggttttcatttatcacgtacaccagcagattcacagaaggagaatatttgaaagccaacttggccgggcatggtggctcatgcctgtaatcccagcactttgggaggccaaggcggacggatcacctgaggtcatgagtttgagaccagcctggccaacatagtgaaaacctatctctactaaaaatacaaaaattagctgggtgtggaggtgcatacctgtaatcccagctactccggaggctgagacaggagaatgacttaaacccgggaggtggaggttgcaatgagcccagatcgcaccactgcactccagcctgggagacagagcgagactctgtctccaaaaaaaaaaaaaaggccaactcaatagtaaaccatgcccaaaaaggtgcaacctattccacaccttctgaaaccatccttcagaggtacctataaacaacttgggatccagcctggtacacatctatggtcctagctacttgggaggctgaggagggaggattgcttgagcccaggaattcaaggctgtagtgatctatgatcccacctatgaattgccactgcacgccagcctgggcaacagagcaagaccccatctctctcttttttttgtccttttagagacagtctcgctccattgcccaggctggatatgcaatggcaggatcatagctcttcacagcctcatatacatgggctcaaaggatcctcccacctaagcctcccaccaagtaactgggactacaggtacttgtcaccatgcctggctagttttaaatttttttttttttgagagggagtctcactttctcgcccaggctggagtgcagtggcacaatctcagctcactgcaagctccgctcactgcaagctccaaacctcccgggttcaagtgattctcctgcctcagcctcccaagtagctgggactacagtcacccaccaccacgcctggttaattttttgtatttttagtagagacaggttttcaccatgtcagccgggatggtctcaatctcctgacctcgtgatccacccacctcagcctcccaaagtgctgggattacaggcatgagccaccacacccggcctagtttaaaaattttttttgtaatgatgggatctcattacattgcccaggttggtctcaaattcctggcctcaagcgaccctctcgccttggcccatctctttaaaacacacaaacacacacacacatacacacacacacacacacacacacacacacacacacacacacagtttggagtgtttttccagaatatttagaaagaacagcctgtaagagccaagatttagacaacagacttttctatgcaagaattttttttctcagcaaaatacagcccatggggcctaatttggccaaccacctgttttcgtacagcccatgagataagaatggtttttacatttataaacggttgaaaaaaatcaaaagaatattttgtaacacatgaaaaatatatgaaattcaaatttcagtgtccagaaatggttttattggcacacagccatgtccattcatctgtgaattgtctgtggcttttctggcagaacaatgacagaattaagtcattgaaatacagatcagtggccaggcacggtggctcatgtctgtaatcccagcactttgggaggccaagacgggcggatcacttgaggacaggagttcaagactagcctggccaacatgatgcaaccccatgtctactaaaaatacaaaaattagggccaggagccatggttcacgcctataatcccagtactttgggaggccgaggagggcggatcacctaaggtcaggagtttgagaccggcctgaccaacatggagaaaacccgtctctactaaaaatacaaaattagccaggtgtggtagtacacgcctgtaatcccagctactcgggaggctgaggcaagagaatcgtttgaacccaggaggcagaggttgcagtgagccgagattgcgccattgcacgccagcctgggcaaaaagagtgaaactccgtctcaaaaaaaaaaaaaagaaagaaaaaagccaggtatggtggcacgtgcctgtagtcccagctactcaggaggctgaagtgggaggattacttgagccgagaagtttgaggcttcagtgagctatgattgtcccacaggactccagcctgggtgacaacagagtgagaccctgtctctaaaataagtaaatgtatcaatttataaacaacactgcagtgaacatcttgcacacacatcttccatcatcttgggctctcagggctctgctggctgaagtggggaggctgggccaggaggcttctctgtctcctagagagaatggggacagcagcccctcctcaccatggctcacttctccccttacccaggctgcccatactggagacagcatttcctgctggagaacctcatcccagcccgctggactccatcatgagcaaccgcttcccccgctggttcatccttggccacctggagacccgccagtgtgaactggcttccaccatgttgacggccgccaagggtgaggctggcagctgtcccgattcctttgtcttcctcctctgtcatctccttcttccttccctcttaactttcctgcctcctcttatcctttcacaaacttccccctgcattctttgagcacctcctatatgtaccggacactgtctcaggtgctggggatgtagcaggtgacaaaactgtcccagatcccctgccctgtggaatgacattctagtggggagaagagagtgatgcagtaaatgagacggtaacaggtgccatggagtggaataaaacagttgaacatttaagcagagacctgaagatgaggtggagccttgcaggtacctggtgtcttagctcaggctgctgtaacaaaacaccagagactgcgtgacttcaacaacaaaaatttattttctcacatttctgtaggctagaagtctaagatcactatgtcagtatggctagctcctggtgagggctctcttctcagcttacagacggccaccttcttgctttgttgagagttggggggagtgaagtggggagtagagaggaaagtgagagagaggaggctgggagagagagagagggagaaaggagagatagtagggggggatagagagagagggagagagaggagtcaggtgccagagaggagagagagaagaaagagaagagggagagaggagagacagagaggagaagttaaatttctccagtgtatcttcttctaaggtcactaaccctctcatgagtacctgaacttcatgacctcatctaaacctaattattggctgggcacggtagctcatgcctgtaatcccagcactttgggaggctgaggcgggcaaatcacttgaggccaggagttcgggaccagcaaatcacttgaggccagaagttcttcaagaccagcctggccaatatggtgaaaccccatctctactaaaaatgcaaaaattagccaggcacagtggtgcacgcctgtaatcccagcgatttgggaggccgaggccgggggatcacctgaggtcaggagttcgagaccagcctggccaacatggtgaaactctgtgtctactaaaaatatgaaaattagctgggcgtggtgaccggcacctgtaatcccagctacttgggaggctgaggcaggagaatcacttgaacccgggaggcaaaggttgcagtgagccgagactgcaccgttgcactccagcctggacaacaagaacaaaactccatctcaaaataataataataataataataataataataataataataataaaagctaacatttgagcagctccttgccatgttaaggccttgccaagtatgggcccaccaccaccctgtgaggtgggttccattgcctgagtgttacccattttacagatggggcagccagggcacagagaggtgaagtgacttgctcagggtcacacagctagtgggtggcaggaccaggatttgaaccctggcattctgggtgtgcaaccaatgcccttgagatgagggagaggtccataggatccctaggtggcttttcttttcttttttttttttttgagatggatattactctatcatctaggctggagtgcagtggtgccatctcagctgactgcaacctctgcctcccgggttcaagcgattctcgtgcctcatcctcccaagtagctgggattacaggcacccgccaccatgcccagctaatttttgtagatggggtttcgccatgttggccaggctggtctcaaactcttgacctcgtgatccacccacctcagcctcccaaagtgctgggattacaggtgtgagccactgcgcccggcccctaggtggctttctgtaacaggaaagggccagagaggagataattggcaagggctaggggcactgaggtctgaatcttcacagaaccatggcccagtacacatccctccacactcacacatgtgcccctgggtggaaggatctgtgtgaacaggtcgggtggtggtcagaggctggtgctgaggtgtatccgatggtgtcctctgtcccgcccttcacccaggagaccccaagtggctgcacacggtactgggctccatccagcagaacatccactctccggccctgctctttaagctggcgcaggacgcctgcaagacagccaccccggtcagcgccccaccagacaccacgctgctgggcatcgcactggagctggggctgcaggtgagggctgccaggtggatgcgggagggcgatggtggctcggggccaggactgactgtgagctgcgcctcccggggcatgggctgagtgtgagccacttcgctgggggcccggcatttgcgtgagctattcctctgtggctggggactgagcgagaaccactcttggggcggggactgtgagtgagacacacctctgggggcgtggcctgagtgtgggccacttccttgggggcgtggcatgagtgagccactcccctgggaatggggactggatgaatcgtgtctctggggatggggtcttcacttgggccacacctctgcaggtggggcctgagtgtgaacctcacctttaggggcggggccacagaaggccaaggtctgtaagtcatgggagtgtgggaatggggttcccagtagggatgaagcctatgaattattaatagaatccgtctatggaggagactgaggtctaggggagagttgtcactggagcggagaggcagggcctgcaagccagcagatggatcgcaagcggagcctgggggtggggcctgggagtgatgtgctattggttaaggatcatgggtgggtgagtttgaagctgagggtgaggcagagcctagcaataaagagcttccttgggggcagggcctgaagaggattgccgcctaaggagagggattcaccactgaagggctggcctggcggaaggtcttgaagatgagatgccaactctaggggtggggtctgtggttgaaagccctgtatgagcccgggtgtggtggctcacatctgtaatcccacactttgggaggccgaggggggcagatcacgaggccaggagttcgagaccagcctggccaacatgatgaaactccgtctctactaaaaatacaaaaattagccaagcgtggtggcacgcgcctgtaatcccagctactcgggaggttgaggcaagagaatcgcttgaacccaggagggagaggttgcagtgagccgaaatcacaccactgcattccagcctgaaggacggagcaagactccgtcttggggaagaaaaaaaaaagtcctgtatgcagggcctgcaactgagtgtctgggtcatccccaggggctgaacaaagggtggtcctgcaaggccaaatcttgggtgcagcttgctggaaaggtgtcattggtagggtgtgagtgccatgggacctggaggagggtggggtctgcaggatagacaggtaaggggcggggcctcaaagggtggcagaagttcactaagaagataaggaatagggccgggcacagtgcctcacacctgtaattccagcattttgggaggccaaggtgggaggattgcttggggccaggagtttgagattggcctggacaacatagtgagacccccatctctacaaaaaactttaaaaattagccaggtgtgatggtgcacccctgtagtcccagctcctcaggaggctgaggcgagaggatcgcttgaggccaggagtttgaggctgcagcagtgagctatgatcgcgccactgtactccaggtaacagagcaagaagaccccaactctaaaagaaaaaaatagaaaagaaaaaagaagttggggccaggccctgtggttcacacctgtaatcccagcactttgggaggccgatgcggatcgcttgaggccaggagttcaagaccagcctggccaacacagcaaaaacccgtctctcccaaaaatcagccatgcatggtggtggacgcgtgtagtcccagctgctcgggaggctgaggcaggagaatcacatgaacccaggaggtgtaggttacagtgagccaagagaccacaactgcacttcagccccggcgacagagtgagaccctcaaaaaaaaaaaaaaaaaaagaaaagaaaaaaaaagaaactggggaccttcccagctagaacaaacaagggccagcagggtgcagaatcagccctggacagcctcctgattggagccgttgtagtgtggggagcaagacaaggagctttcagaggctactcaagaggtaggagcttacagaaggcagggtctgcaggacaggacctgtggatggggcctcaggggagaggcaaacacgtgagctgctgattggtggtgggacctagtgaaggtggggcttatacagcaggtacttagaggcaagagagaggagccaacaggaagcatggaggtttcaggagcgaagggacaggttggtttgttccggcataggatctatgaggtgggatctggggtaggatctgtgaggactcacttcagaagaacagcaacaacagcagtgatattaagagctgacattacctgagagcattttcaagcaataagcaccttgcagaaagcttcacctacgcaattttgtttacttctcacaacaatcaggctgggtgcagtggctcacgcctataatcccagcactttgagaggctgaggcgggcggatcacttgaggtcaggagttcgagaccagcctggccaacatagtgaaaccccatctctactaaaaatacaaaaattagctgagcatggtggcgggcacctgtaatcccagctacttgggagcctgaggcaggagaatgcttgaactcgggaggcggaggttgtagtgagccaagatcgcaccactgcatgccattctgggtgacagagcaagattccatctcaaaaaaaaacaaaacaaaacaacaacaaaaaagaaaaaacaacaatcctatgagacagatactattttatctccattttctaggtaattgaggcccagaaagttgagatcacttacccgggttcattggatcagctttaacctccaagtgtttctggggtcctccatctcccaacgcccctccataggccagcccaagactcaggctaacccccttctccccacccctaccttgcaggtgatgcggatgactctgaacgtaatgacctggcggcggagggagatggtgcgctggctggtcagctgtgccacagagattggtgagagcccctaaggggacctgccacccacttcgctgttctggttctgcagagcgcactgagagaaccaggcagacaagaaagagagaagtggcggggtgcggtggctcacacctgtaatcccagcactttgggaggccaaagcgggaggatcacttgagcccaggagttcaagagcagcctgggtaacatagtgagaccccatctctacaaaaaattaaaaattagctgggcgtggtggcaagtgcctgtagttccagctgcttgggaggctgaagcaggaggatagattgcttgagcccaggaggtcaacgctacagttagccatgatcataccactgcactccagcctgggcaacagaggaaaacctcctctgggaaaaaaaaaagagagagagagagagagaagcaagccaggcatggtggcacacacctgtagtcctatccggagggctgaggtgggaaaatcacttgagcccaggagattgaggttgcagtgagctgtgattgtgccactgcactccagcctgagtggcagggtgagaccctgtctctaaaaaattgtttaacaaaaagaaagagggccaggcgcagtggctcacacctgtaatcctagcactttgggaggccaaggcatgtggatcacttgaggtcaggagttcgagaccagcctggccaacatggcaaaaccccatctctactaaaaatacaaaaattagccagatgtggtggcaggtgcctgtaattccagctactcgggaggctgaggcaggagaattgctggaacctgggagacagaggttgcagtgagccgagaactcactaccgcactccagcctgggtgacagagcaagactccatctcaaaatgggcagatcacaaggtcaggagattgagaccatcctggctaatacggtgaaaccccgtctctactaaaaatacaaaaaaactagctgggcgtggtggtgggcccctgtagtcccagctactcaggaggctgaggcaggagaatggcgtgaacccaggaggcggagcttgcagtgagccgagatggtgccactgccctccagcctgggcaacagagcgagactccatctcaaaaaaaaaaaaggaaagagaagtagagactcttcagagactcttctccgattccagcctgtgctcagggcttggccgggagggaatggctggccagcatggagctggacaaaggcctagaggctggccaggctaatgtggctgcagggggttgagggggttgcagaaagaggctccaaagcttagccttctacacacgtgattcccacctagtccaggtgcgccctgatgatttggaaaggaagtttctgttcagcatggtgtggaggtggaagtggaggtggcagtgtcatggttaacccacgcatacatgtacgtgtgtctgcccccgctcctgacggatttccctccctcacctcccaccaggcccgcaagccctgatgaatatcatgcagaactggtattccttattcacaccagtggaggcggctaccatcgtggcagtgacgggcaccacacacgccactctgctgcgactgcagctggacacatcgcggagggaggagctctgggcctgcgcccgcaccctggccttgcagtgcgcgatgaaggaccctcagaactgcgccttgcctgccctgaccctgtgcgagaagaaccactcggccttcgaggcggcctaccagatcgtgctggacgcggcggccggcggcctgggccacgcccacctcttcactgtggcccgctatatggagcaccgcgggctgccgctccgggcctacaagctggcgacgctggccctggcgcagctcagcatcgccttcaaccaggacagccaccctgccgtcaacgacgtgctttgggcctgctctctcagccactccctgggccggcacgagctctctgccatcgtccccctcatcattcgcagcatccactgtgccccaatgctgtccgatattctgcgccgctggactctctcggcgcccggtctgggccccttaggggcacgccgggccgccaagccactgggtgccgaccgggcgccgctctgccagctcctggacgcggcagtcaccgcctacatcaccaccagccactcgcgcctcacgcacatcagcccgcggcactatggggatttcatcgaattcctgggcaaggcccgggagaccttcctgctggcgcccgacgggcacctccagttctcacagttcttggagaacctcaaacagacctacaagggcaagaagaaactcatgcttttggtgcgggagcgttttggttgagggacagtggggtgcgtgggagtggggatccccctcgcccctgcgtcccccacccttgctctccaattaggcccacgtggcatttcagtattattaagtcagggaaggagcccggctggagatgggggcagggggagcagcatcctgccacgtgtgtgcctgggagtctgtgagcaagtgtgcaagactccagaagcagaagccatactgccacccagaagcctggaaggggtgtgtgcttgggctgctggtatgaccccactttgggcaccccaaaagcaataggcaaactccccttacccagactggcttgggctccaggagggaggctgggaggcaggactttccagaaatcggccctctaagtcaatgtagcacattttcccccaaccccaccctgggtggccaagggtcctcccccaccccctactgctcagggccccccattatgccacctccaaagtggctgcccagccaggaccattggctcacccccactgaaggaattgaagaggcctcaggcctcagcctcatacctcacccccttatcctatccggccaggacccccatttccttgggcactagggtcccagggtgggctcagggttggggaagtcctcgctgccctctcttctcacctgctagtcactggacgtacaactcaggaactgagcgaggctcacactgccccttccaacctggggttgggggacacagacgcgagagagccggagacccccacccccgatctggaaaggaaagagacctgtatcttggtgtttttctggctttttcaccctttcgcctcctgtctttctgcttcgccccttcatcttactctgtttccatttttcccggcacttacctgcctttctctctgcacctaagtccctgccgccctctctctttggccatccttcctttcccccaccttgacccagggaggagaagggagaacatcacccccccaagtcacccccacatcttttcccttcttgtatattaaggacaaaataccacatcattttgtaactttttttctatttattgaacggtgtattacatgtccttttcctttttttttttcaaagattgaacagaaatttttctttttaattttattttgagactggggtgcatctccagagccactcacaccctcaacctcgtttcctccgcaaaaaaaaaaaaaaaaaaaaaaaatgtctggccttatttctgggtgcagcgccaagcgaggggtgggatgggagcgactgctggcttcattccatggtaattatgtaaatatttccctttttttttttttggtctttctctgttgcccaggctggagtgcagtagcgcgatctgggctcactccaacctccacctcccgggttcaagcgattctcctggctcagcctcccaagtagctgggattacaggcatgcgccaccacaccgggctaatttttgtattttttagtagagacggggtttcaccatgttggccaggctggtctcgaacacctgacctcaggtggtctgcccgcctcagcctcccaaagtgctgggattacaggcgtgagccaccgcacccggccttatgtaaatatttcaaaacagagatggacagctcaccatgagggaacacagggctgaatgcgttaccgctgtcatttaatcgtcaccacagccctatgagttggtaggattatcttttccattttacagatgagaaaactgaggttgcaaagtggaaagaaagggcacccagcggccgggcgcggtggctcacgtctgtaatcccagcactttgggaggccgaggcgggcggatcacgaggtcaggagattgagaccatcctgactaacacggtaaaaccccgtctctactaaagatataacaaaaaattagccaggcgtggtgacgggcgcctgtagtcccagctactagggaggctgaggcaggagaatggcgtgaaccctggaggtggagcttgcagtgagccgagatcgccccactgcactccagcctgggcgacagagcgagactccgtgggtggggggcaggggggaagggcacctagctaggacgtttgatttaggacctggttggggccactgacccctgcccacccctgactgcagggtccttgagcccctaggaagggccaagatgggggtggggggcgccctggctccagacaccaatgttgggggtccttgtctccaaattgctgagcatgggaggctgtggcaggtgttggtgcagctggatggggaagacaccccgatcaaaagcgggaaccccgggtttagactcgacctcggtgggcggggctctggccaagagaagaaaaacggagtgggggtggtctgtgcgtggacactcgccaggggacgtggccagggcgtgtctgggatcttgcgccactgaagaggctcccagtcgtcaaatagagtgggggatgggatccaaaggacggcgagaaagcccgtggttgtctaaacgtccctggctccccgagaagcagtttcctcggggccttcctgccttttggatgaatggagatgctgtgtctgggtcactgccagagccggggcaggagaggacagaggcttcccggagtggcagggcccgtcgctagagggcggggcccgcagtcgggggcgggactttggcggcgctgtgcatggggattggcttttcgcaccgcccctccgctcgagtgggccaatcggagacggccccacctcctgccccgccgcgcgtattccagcaggtatgtgcgggcggacccgggactgccccgcgcgctccgtggcgccgcctcgaggtctgggacggtggaggtgggtggagagcccggagtgcaccccttgtggtccctgccgccttcggacctgggggaccctttactgtgcccctcaggtgtcacccacgaatgttcccatgttcctggggcgtcacgcaggtcccagccacatccaaatgtccccccttaagaactggggtttccttcatgtcacatccctcaaacccaagttcccctccagcattctcagataccaggcaccccaaatcttcccctgaggcctgagtaatcccgtaggtccaagttgcccccaaatgtcactagctcaagaccctcagatcctggttatcgccacatgtcacccctcaggctcagcgtttccctcagggtcaccccaccaccaccacttcagatcagcttccatcctcccttgatcagcgatgtgaaaatctttccactctagggtttccctcatggtcaccccacgatccaggacacccccaaggtcacctttccaagcacaggataccctgctgcacagagcaggtggggcagggatgggcaggcaggagcccggagtgccaggatggtaaattcaggccaatcaaaagctgaaactccagcgatgggaggcaggagtgaatcacagaccagaccttcaggaatgaagtcagggcaacttttatttacttgaacaacagacatgacacacagcacgatctctcctctccatcccatcccaagcttctgtccacgactacccagggtggggaaaaaggcaatggcccagccccgatgacctgggggacttcagtgtgcctcctcagtcccacccagaaaaaagcctcctcccatctgatttcaagatagtggagaaaagccaggcacggtggctcacacctgagccacctgtaattccggcgcattgggagactaaggtgggaggatggcttgtggccaggagttcgagaacagcctgggcaacatagtgagacctgcccccccatctctacaaaaattaaaattaaaaaaattagccaggtgtggtggcgcatacctgtagtcccagctctactggggaggctaaggcaggaggatcacttgtgcccaggaattcaaggttgcaatgagccatgatcacaccagcctggccaagatggtgaaaccccgtctctactaaaaatacaaagattagccgggcatggtggtgggtgcctgtaagcccagctactcaggaggctgaggcaggagaatcgcttgaacccaggaggcagaggttgcagtgagccaagatcacaccactgcacttcagcctgggcaacagagtgagactccgtctcaaaaacaaacaataaaaggccaggcacggtggctcacagctgtaatcccagcactttgggaggctaagacgagcagattgcttgaggtcaggagttcaagaccagtctgggtaacatggcgaaaccccgtctctacaaaacataaaaaaaaattggccgggcgcagtggctcatgcctgtaatcccaacactttgggtggctgaggcgggcagatcacctgaggtcaagagttcgagaccagcctggccaacatggcgaaactcggtctctactaaaaatacaaaaattagccaggtgcggtggtgtgcacctgtaatcccagctacttgggaggctgaggcaggagaatcgtgtgaactggggaggtggaggttgcagtgagccgagatcgagccattgcactccagcccgggtgacagtgcgagactccatctcaaaaaaaaaaaaacaaaaaaaaaaaaacagagtcctaactcttccctgccctgagaaccccctcaaggcagggaggatcagctattcccagcgcctcaggactaagcacacctgcttgtgtcccttctgggtccacaaggaacttgttccatgccccacatgtggggcgggtgtcactgctcctcccggcaagttagaaagctgcagggcccagcaagaaggggccaggtcaggtcaacccagcctgataccggaagccaggagttggcatttaacggtctggaggcccaaggcagcttcctcttgggtaactggctgctaggaaggtgcgggccgggccagtgcccctgccaggcttgggagaggaggggccaagcctccaggcccggaaaggacacagctggcttcccttttaatggaagggccacccactcacccacctatccatgctggcaccacagcccagcctgagctgtggccatgcaggggtccccagttgcagagttggggatcagggcctgcagcacacatttgggcccagccaaccccacccaccacatccctcctccagacacaggtctgattctgagtcctcatctctgctccaagcatcagcccacccagggaaggcaggggctgcaggctccaagggggcttgacccctgttcctgctgaactgagccagtgtacacaaaccaactgtgtttcagctcagtaggcacgggaggcagagcccagggaggccaggcagcaggatggcaggcagacaggcggcagcaggggacaggcggcaaggccagaggaggtgagggcctggggggcggaacttagccactgtgaacacgacttggtgtggaccctgctcacaagcagctaagccctgctcctcaggccaggcacaggcttcggggcctctctgccaccccgtccccgggcagcatcctcggtggcagagctcagggtcggttggaaatccctggcaatgtgatttgtgacaggaagcaaatcccatccccaggaaccccagccggccgtggcacaggggtgaggggggcaccgggcggggccagaggctggcacctggaggggagaaagagagagagagcaaaggaggtaatgagatttggggacacctcccctccaggtccccagatgcttcctttgatcacagggaagctcttttctcatatgcaggagccaccacacggggagctggagcctagctgtgccctccgttccagccccaggactggagaggcagagatacctagagggcccatgcgggacaaggaggctacagcaacttgcatggccaagctcccccctcattgagccctgggcaggccaaatggggccatggggagaggaagccaaggggggccaggcaggcgggtgaggaagtgatctcaccccagctggcgccacttcctagaagcctggagggcaggaggaaaccaccagggcctccccccccgtggcccggtctcctcagtggccagggcttagcccacacccaccagggcggatgccggcagcaaggcacccccctctctttctagacacgcaccccccgccccccagagcacaggatccaagctccaagatacaggcctctccacccaaacagcccaaggttcaaatccttgctccacagtttcccaaagactctccaaagcttcagtttccccatctgtaaaatggagccaagagcctcttttgcatagcccagtgagatgtcaccgagtatgtatgtcactcagtaagtgcccagcaccagggcaagatacaggattttcaggacccggtgcaaaatgaacacgtggtcctctagttcgaaaactaagaatttcaggccaagcatggcggctcacgcctgtaatcccagcactttgggaggccgaggcaggagagtcacctgaggccaggagttcaagaccagcctgcgcaatacgacaataccccatctctacaaaaaaaaaaaatattttttcttttttgagacagggtctcactctgtcgccacggctagagtgcaggggtgcaatcacagctcactgcagcctcagcctcccaggttcaagtgatcctcccaccttagcctccggggtagctgggactacagctatgcaccaccatgcccggctaattttttctttttcttttctttttttttttttttgagacagagtctcgccctgtcgcccaggctggagtgcaatggcgtgatctcggttcactgcaacctccacctccagagttcaagcaattctcctgcttcagcctcccgagtagctgggattacaggtgcccgccaccacgcccagttaagttttgtatttttagtagagacggggtttcaccatgttggccaggctggtctcgacctcctgacctcaggtgatccgcccacctcggctttccaaagtgctgggattacaggcgtgagccaccacacctggccctaatttttgtagagatggggttttgccatgttgcccagactggtctccaactcctgggctcaagcaatccgcctgcctcagcctcccaaagtgctgggcttacaggcctgagccacagtgtctggcccacaaaaaattcactaaaaaatcagccaggagtggtggtacacatctgtagccccagctactcaggcggctgaggtgggaggactgcttgagcccaggagtttgaggctgccgtgatctatgaccatgccactgaactccagcctaagtgacagagcaagaccctatctctaaaataaacaaaaacaagtttaaaaaaagaaaataatttcaggctgagcgcggtggctcatccctataatcccggcacttcgggaggccaagacaggaagatcgcttggggccaggagttcgagaccagcctgggcaatacaagacaaaaaaattaataataataaaaaaaaattcatgaccccagcagtgcaacattaaactaacctccaggtccctccaagcagggctgccgtgagactgcccgtttcacaaatgcatgaagccagccctaagtctttagtgagtggagcctcttttgataagagcccaacacctggctagcagactccagttttggagcccaagtctgcccagatttgaaagccccagctctgcagcttctgagctgggtgactctgggcaagtcactcaacctctctgggcctcagcttccccatctgcaaaacagggataataagtatggacttcataagtcatggtgaggaccccatgagtgataaacatgatcacgacagagctgctgctgtctttgccaaggcaaaggataacggaaacgtgggtgtctcacaccaggaccccagtgtccgcccgatgtggtggcgctcaccacttcgagacaggcggcgagtgatgtcctgttttgtcccctccctatacacacatacacacataccagccactctttcccatcaggccccagcccagccctgtccccttagggtctggaggcgccaactgggagcaggcgaggccccgcagggcggccagcctccctgggccgcctccggaagtgagacagcacattcgtgtcccagggacgagaacgggaagggcggccatttggccaggctcgtttcctgtggggtttcccctgcacagagcccagggccggggccaaggccactccccatccccgcaggcacaaaaggtctgggtcttgagtggaaggggtgctgccatgcaggtgcccaggagacagggtcccctttaccaatcatggtgcacttctcaggctcttgggagatggtgtccagggggaaaccaagctcctagcagctggaggcatgagggagagggcgggcccctgggctggggagcaaagcaggccccaggctgcatcaggacaccccggccagccaatgcatgtgggtatgcctgaataccccctccagacagcgtgtgcgtggaccagacacacaagggtatgtatgtgtaccgctacccccccaaccccatgctccaagaatgaatcaggggcagcttccgccgggggcgccaccaccacctccgcccccaagcctggtccccaaatactttccaccctcacagagcagctgggatcggaaaataccaagggctgcaggccccgccctgcccgccgcgccacccgccctcccagcctgtcactaacgctttgcctaatgggcccagactctcagcagaagctccgtgggctgggcctcgagccagccgccaacctgggctgcccggccaagcgccgcctgaccaggagccccccgcccctctgccccaatcccagtgcagcgacaataacaaccgccccgatgggcagccctcagagggtggcactgggtagggaaagtcagggcactgacaagtgggtgggccccgctgcccacccagggctggggtggggggaggctcaggaaggggtgagtaagtgagggctgaatcacttgttataaataggggaaccatgaaagtgacatcccagcccccattgcgtcccgccagtccacactctaacccccacttagactttaatctttcccagaccaatcacagaattcccaggggccccctcaccttcatgttgggaacccttagtagagtggtacaccccgtcatcaggtccacccctgccttctccccacataggtacattttgcagtgagggcctggctgtgggggtcccctggccttgaatgcagtcactggtgtctgcgccctatccacctccctcaacgcaccgattcccaggcccaaggctcagggcctctaggctctccaaggcattctcagggtgtgggccaccacagtcctggagggtgaccccagaacctaggccaggcgggaggccagggggcttggcatcttcgaagtcagttccccaggcaccgaggccccacatcctagaccacccagccctgctctgcccagggccacagctcagtgaccacacccagggtggcgccagctccagcaccctggggcaaggcgtcgctggagcgtgactcagccgtgcccagcatggcggcgcccttctctgcccagggattctcacccacacccactgccctccgctcaacatccttcccaggcgaccggccctaaaggacacaccttccccagacacacctccgtgtccacccaggacaccaggagggaagaaggcggccaggggcgaagtgtacacttctctccgtcccatttccaaatgcttcccatttatagatagaataattaaggctcagagattcagactggggcttaaggtcatggaataagtcttaaaaaaaaaaaaaaaaaaaaagccaggcctgactgtggcctaaaacacatccaacgtggaaaacagaggttacaggaaggagttttctcaagatcgcccaaggttcctggcgccgttattcatggaggacagaatcccccacccagctttccaaggtgaagggcaaactccaaaaaatgctttaagaggtatcaaagcaccacctagatcgggcgagcgggtcaccccagtgtacccaccgggctaattaccctgggattgcagatagatgggggcctgccccgcagctgcggtctgcatggaacatctggcgtccacttgcattgttagagggtgggcacgacacgggggtccctcctaaagcatccgcctctgctgtctttctccagcgagcaagggtcggcggaggctcagtggccaggccagcacagacaggcccgaccctctggacacgccctgtcacgcatgtgctccgcgtgccagccccaggccaggccggcacctattttagggccccctctaga

SEQ ID NO: 599 - DNA, 3710 bp, Homo sapiens
gccagtttttttgtaaagatgggagcctctctatgttgcccaggctggtctcgaactcttggcctcaagcgatcctccctcctaagcttcccaaagcgctgggattacatcaaccccaggctcctaacccactggcccttcctacaggtggaggagcggttctcccgggtgcctgagcccgtccagaagcgcatcgtgttttggtcgtttccacgcagtgaacgggaaatatgtatgtactcgtcgctgggttacccgcccccagagggcgagcacgatgcccgggtgccctttacccgcgggctgcacctgctccagagcggggccgtggaccgcgtgttgcaagtgggattccacctgagcggaaacatccgcgagccagggagtcctggagagcccgagcgcctctaccatgtctccatcagctttgatcgctgcaagatcacgtccgtgagctgcggctgtgacaaccgcgacctcttctactgtgcccacgtggtggccctgtccctgtaccgcattcggcacgcccaccaggtggagctgcggctgcccatctccgagacgctctcccagatgaaccgggaccagctgcagaagttcgtgcagtacctcatcagcgcccatcacactgaggtgctgcccactgctcagcgcttggctgatgagatcctcctgctgggctccgagatcaacttggtgaatggtgccccagaccccaccgccggcgcaggaatcgaggacgccaactgctggcacctggacgaggagcagatccaggagcaggtgaagcagctactgtccaatggcggctactacggggccagccagcagctgcgctccatgttcagcaaggtgcgggagatgctgcgaatgcgggactccaacggggcgcgcatgctgattctcatgaccgagcagttcctgcaggacacgcgcctggccctgtggcggcagcagggcgcgggcatgacggacaagtgccggcagctctgggatgagctgggggccctgtgggtttgcgtcgtcctgagcccccactgcaaaccagaggaaagggcaggctggctccagctactcagcaggtgggacaagctcgacgtctgcccactggaagagggcaactactccttcgacggccccagcctgcagcccaccatggcccccgccccaggctcggaggaagaggaagaggtggcagccacaagtccccgccacacggtatttggccgcgccttgctggctggagagctacactggaatgacgcctacctgcagaggatcctggccagtgactcctacgggcccagcctcacaggcagcgtgggtggggacaaaccgactttcgacccccagggccgcccactgtggctgggagaacctttccccactgcctgtgcccgtgtggacaccctgcgtgcccacggatacccccgccaggccctgcggctggcaagtgccatcatcaacacactccggctgcagcagcggcatcagctagagagctacaagcagcagaaaaaagagctgctccagaagggctccacctgcatcaccaacaccgaaggatgggtggggcaccccctggaccccattggctgcctctgcagggcgctcctggaggcctgtcgtctggaggaggagacacttaccctttacccagactcaggccccgagaagcggaaggtggcctaccagcacgtgcctgtgcccgggagccctggggagtcctacttggtgctggcgctggaggtggcactgctggggctggggcagcagcgggccctgccggaggggctgtacgcccaggacaaggtggtgcgcaacgaggagcagctgctggccctgctggaggaggtggagttggatgagcggttggtgcaggtgctgcgcaagcaggcggggctgctgctggaagggggtcccttcagtggctttggggaggtgctgttccgggagagcgtgcccatgcacacctgtgcccgctacctgttcaccgcactgctgcctcatgacccggacctggcctatcgcctcgcgctgcgagctatgaggctgcccatactggagacagcatttcctgctggagaacctcatcccagcccgctggactccatcatgagcaaccgcttcccccgctggttcatccttggccacctggagacccgccagtgtgaactggcttccaccatgttgacggccgccaagggagaccccaagtggctgcacacggtactgggctccatccagcagaacatccactctccggccctgctctttaagctggcgcaggacgcctgcaagacagccaccccggtcagcgccccaccagacaccacgctgctgggcatcgcactggagctggggctgcaggtgatgcggatgactctgaacgtaatgacctggcggcggagggagatggtgcgctggctggtcagctgtgccacagagattggcccgcaagccctgatgaatatcatgcagaactggtattccttattcacaccagtggaggcggctaccatcgtggcagtgacgggcaccacacacgccactctgctgcgactgcagctggacacatcgcggagggaggagctctgggcctgcgcccgcaccctggccttgcagtgcgcgatgaaggaccctcagaactgcgccttgcctgccctgaccctgtgcgagaagaaccactcggccttcgaggcggcctaccagatcgtgctggacgcggcggccggcggcctgggccacgcccacctcttcactgtggcccgctatatggagcaccgcgggctgccgctccgggcctacaagctggcgacgctggccctggcgcagctcagcatcgccttcaaccaggacagccaccctgccgtcaacgacgtgctttgggcctgctctctcagccactccctgggccggcacgagctctctgccatcgtccccctcatcattcgcagcatccactgtgccccaatgctgtccgatattctgcgccgctggactctctcggcgcccggtctgggccccttaggggcacgccgggccgccaagccactgggtgccgaccgggcgccgctctgccagctcctggacgcggcagtcaccgcctacatcaccaccagccactcgcgcctcacgcacatcagcccgcggcactatggggatttcatcgaattcctgggcaaggcccgggagaccttcctgctggcgcccgacgggcacctccagttctcacagttcttggagaacctcaaacagacctacaagggcaagaagaaactcatgcttttggtgcgggagcgttttggttgagggacagtggggtgcgtgggagtggggatccccctcgcccctgcgtcccccacccttgctctccaattaggcccacgtggcatttcagtattattaagtcagggaaggagcccggctggagatgggggcagggggagcagcatcctgccacgtgtgtgcctgggagtctgtgagcaagtgtgcaagactccagaagcagaagccatactgccacccagaagcctggaaggggtgtgtgcttgggctgctggtatgaccccactttgggcaccccaaaagcaataggcaaactccccttacccagactggcttgggctccaggagggaggctgggaggcaggactttccagaaatcggccctctaagtcaatgtagcacattttcccccaacccca

SEQ ID NO: 600 - protein, 1084 aa, Homo sapiens
MGASLCCPGWSRTLGLKRSSLLSFPKRWDYINPRLLTHWPFLQVEERFSRVPEPVQKRIVFWSFPRSEICMYSSLGYPPPEGEHDARVPFTRGLHLLQSGAVDRVLQVGFHLSGNIREPGSPGEPERLYHVSISFDRCKITSVSCGCDNRDLFYCAHVVSLYRIRHAHQVELRLPISETLSQMNRDQLQKFVQYLISAHHTEVLPTAQRLADEILLLGSEINLVNGAPDPTAGAGIEDANCWHLDEEQIQEQVKQLLSNGGYYGASQQLRSMFSKVREMLRMRDSNGARMLILMTEQFLQDTRLALWRQQGAGMTDKCRQLWDELGALWVCVVLSPHCKPEERAGWLQLLSRWDKLDVCPLEEGNYSFDGPSLQPTMAPAPGSEEEEEVAATSPRHTVFGRALLAGELHWNDAYLQRILASDSYGPSLTGSVGGDKPTFDPQGRPLWLGEPFPTACARVDTLRAHGYPRQALRLASAIINTLRLQQRHQLESYKQQKKELLQKGSTCITNTEGWVGHPLDPIGCLCRALLEACRLEEETLTLYPDSGPEKRKVAYQHVPVPGSPGESYLVLALEVLGLGQQRALPEGAQDKVVRNEEQLLALLEEVELDERLVQVLRKQAGLLLEGGPFSGFGEVLFRESVPMHTCARYLFTALLPHDPDLAYRLALRAMRLPITAFPAGEPHPSPLDSIMSNRFPRWFILGHLETRQCELASTMLTAAKGDPKWLHTVLGSIQQNIHSPALLFKLAQDACKTATPVSAPPDTTLLGIALELGLQVMRMTLNVMTWRRREMVRWLVSCATEIGPQALMNIMQNWYSLFTPVEAATIVAVTGTTHATLLRLQLDTSRREELWACARTLALQCAMKDPQNCALPALTLCEKNHSAFEAAYQIVLDAAAGGLGHAHLFTVARYMEHRGLPLRAYKLATLAQLSIAFNQDSHPAVNDVLWACSLSHSLGRHELSAIVPLIIRSIHCAPMLSDILRRWTLSAPGLGPLGARRAAKPLGADRAPLCQLLDAAVTAYITTSHSRLTHPRHYGDFIEFLGKARETFLLAPDGHLQFSQFLENLKQTYKGKKKLMLLVRERFG

SEQ ID NO: 601 - DNA, 50657 bp, Mus musculus
  misc_feature (1)...(50657): n = A,T,C or G
catgaccaggaagcaagttgggatgatttcaggttactagaccaaagacatggtattttttggagagaggctccgtatttgtgttaataggaaaggagaaaacactctggactctttccagagttatattcatcatatatgacagggagagacctcctgaagatcttggctacagaaaagaaaaatttgagaacatcatacagggcaggtaacttgatttgctgattcctacacatgggaacagcccagtaattgccttagacataaaaaatatctctatccaaaactccagctaaataaatcttggaatccttaagattcttcgtgccctctttcatatggcatggagggttttcctccatgacaagggcatatgagacagaccacagccaaaagccacaagaggaagagatggccaaaatataggtacaaaggaaaaagcagcgccagaatagctgcccaaaagggtccatgggcaacacagataaaatataaacttagtaagtaataatccagaggtatcagtggagagagtgtggtgagcttttggggccacttctagaaacttggcaggaatttgactttgggcctggacaaggaagtaggcttcaggcaagaagttgactttgaggtaggacagggaagtaggctcagatattttggtcatcctgataagccctaaaaacagtgatcaagggacttcatttattgccttgcttgttccttgactatttgtgtttattgtcttgcttgttccttaacctagaactgaccctattacttgcatgtaattgaaatggtgtaaaagcagactggggcctggcatggtggcgcctgcctttaatcccagcacttgggatgcagaggcaggcagatttctgagttcaaggccagcctggtctacaaagtgagttccaggacagccagagctacacagagaaaccctgtctcaaaaaaccaaaaacaaacaaacaaaaaaccaaacaaacaactaagtttcacaaagtaaatggatctaggtgaagaacagcttctaatctaactggagattaggcagcaactagccaggctgctagaatctgtgggaaaatgttggtgcctctaacatgattaaagtttagacttgctgagaatatgtcttgttcactaagactgctgacaattaggccctgttcccaaatcaaagaacatacctctagcaggcagctctaaggggacagtactgggcaacaggtacctactgagtaagtcctggttcctttatgaggataagtataattctgtctgatgggcaggtggcccagggtattccctggagaagagttgctagaaaagaacagcaccagtcaacttcaaaagaggctatgacaatatcggtgttaggtaaatcatcgcccagtaatccaaaatggccagacttgccaggttcctttcaattgctcgaagtataacatggtgctggaagctaaaaggaatgtaaagatggcaggatatgtggaatgttaaatcctaaggcgtctatacgctgttaaaatgccctgttggggctggtttctcttagggtgttagccagaactggatgcatggtgttaaagagctttttccttattccctgggtgtttgagtcttctcagaggggtgggttagtgtggtgggaacctaccttgctgcttcagtaatgcctcaagtgtactcacaaacagtgtcaccatgaccttttaccttcttgaagttcctacactgcaggctctgctacctaaaattctcatcaggtactgagctactggacacagaattcctttttcaaaatcacactcccactgctagaccaaccctcaagggaaggggaagcttttctaaactagcaatttggagcttgtaacattctttaaaaatgtgaaagtctttatattgcaacacaagagaatataaatgccagtgagaagtttcctttcctcttcagtgctgttgaggcatcacctgatttccactgaatatgccaagtagctagtaaaatatctcaagttaacataaagtattacattttagggctagggttgtagctcaaacaagtgcttgtttaatatgtgaaaggccctgggtttagttctgaaaccacaaaggaaagggaaggagggaaggggaaaagggtagtaagaggggtagtaagagagtatctttttgtagtgttgcagtgccatagcgataggaggggtggagtctggaggagggactgaaatgtctgagtaggactgagcaaacacagctaagaactttggaaaagcaagcaagcaagcaagcaagcaagcaagcaagcaagcaagcacactgtacaatttttctcgttacctgagggcagaccactcctgtgaatccagatgtgggtgatacagctggtcagaaccttgctgctccaaataggatctgtatagcaggttgtgtgcacagccagggtgcttattaaaaattcagactcgcgggctccactccaggttcactgaattgcaatttgcattttgccaagatgcctggcccatgcatgcacacattaagatctcagaacctggtctggaacagcagcaaggaggacggaggagccaaagtgaactccaagggatcccagtggcagagcagccaagtcattgaaataagacacttcttttcctcacccttcacacattcaaattacaagcagtctggcctatttattagcaatgcagcctcatgtaaattatttacctcctctttgcctcattaatagagctctgttgtcactacaaatccagtgcaaacctgctaattgctattcttttttttttttatgtatatgagtacactgtagttgtcctcagacacacctgaagaggacaccagatcccattacagatggttttcagccaccatgtatgtggttggttgctgggaattgaactcaggacctctggaagagcagtcagtgctcttaaccgctgagccatctctccagcccttgtttttaacttataataaagtggaattgctgtttttaatctccataccctggatgttaagttttcctaactagtacagatagtatttactctttttttttttaaaaaatattttatttatttttagagtctgggtgtcttgtcacactggttgactttgaacttggcttgtagctgatggtttctcaattcttttttttttaagatttatttatttatttatttatttatttatttatttacagtgtatacactgtagctgtcatcagacactccagaagagggcatttttgttatggatggttgtgagccaccatgtggttgctgggatttgaactcaggaccttttggaagagcagtcagtgctcttaaccgcggagccatctctccagtccagtatttactctttatagatggcttctttcattcaatattatgcctatgctgaaagacggattgaagaaagagagactgcaggatgagtctgggcttctcaaacagcagagggttcagcctctccagcactgaacactgacagcttcctagaaactctttttattgctaaacaaaatgcacttttagcaagtcaatttctatatcagacttcttatccgatataggggttgttttgacagacccatcatctaagcatttatgccctgagaatcctttagaaaaacaaaatccccttaacaatccctgacaaaccccggcagtggtggcacacacctttaatcccagcatttcggaggcagaggcaggtggatttctgagttaggccagcctgctctgcagagtgagttccaggacagctaaggctacacagagaaatcctgtttcaaaaaaataccaacaaacaaacaaataaacaaacaacccccccaaccaaaacaacaatcactgaccaagactacttcaaagcatgggagcagccatcactccagaattcatgccagacatgatggttctgctaaaattttggttcattcattcattcattcattcacacttgcaggagctctcagccaggcaatgcatgttttaaccccagtattaggaagcagaggcaggcagatctctgagttcaaggccagcctaagacagtaagttccaggacaaccaaggttacacagagaaaccttgtatcaaaaccagcaaacaagcaggctctcaggttgttgctatgtattaggaagtgtatgcatgtatatatgtatgtatgcatgtatgtatgtatgtatgtatgcatgtatgtttgtgtgtgtgtgataatacaacactccagcttattttatagataagagcactgaagtaactgactttttcatgtcatgtgccaaacaagtagaagaactaaaaattaaacccagtctggttttcaaggtacttttacttaattggtagagtgcttaaacccaaattgagtttatctcaacagcctttgctctttaatgagagttaaatgtggctgattgtggtggcataggcctttaatctgagtgcatgagaggcaaaagcaggcagatttctctgcgtttcaggccagctaggctgtatacatagggcttttaagatcagccaggagcacacaatgagaccttggctttaaaaaaaaaatcatattttaattacattttagtaattctttttttttagtttttttaattaatttttttgaattcttttttttattagcaattctttgaagtaataaaataggaagtagaacttatataccaggtgctattttttaaatattaattataaatattaaatataaaatattgttatagcagtcatggaatatttgataagaggccaaaaagattaaatgaagtaactttatgaaatgaattaattgaatgaattaattaaatgaatctagtaattgaaatgaatgaaatgctaaaaagaaagaccacaatgtttgaattgccaatgcatcttagtgtctctgtcaatatatttcactgcatttaaaatgttaaaactaatacgtatataatattgtttgccaaacaataattgattcaattaattcatttcaatatactcactttagagagcaagcaacgggtagaaggatcaagagtgtgctgctgtctctcaagagtgctttcttgcaccaggtatagtagcttatggctgtaatcctggtaactccaaaagttgaagcacgatggccagtgggtcaagaccaggagctggggagatggctgagcgggtgaagggccctgaggacttgaattcagatccttaaaacttaggtgaaactctggcagcagcagttagggtctataagcccagtgccgggtgaggatgaccaggggtttgaacacgggaggaccacccaccgtctatctaacactgtaatcttcaggttcagtgagagaccttgtctctcaatcaatcaatcaataagatggaaaagatgataaactgtttctctgctggtgaatgaatatattcaaggcacattagattatattaaatgcaggtttattgggaagctgctctccggcaagttactggccccaaggaaggaggccagggaagtcaccatggggaattagggagagagcacccaaannnnnnnnnnnnnnnnnnnnccatgggaattagggagagagcacccaaacagagaaagaagagtatgagaagaagagagaggagggagaggaaaccaaaatgtctggattatatagggaagagcctctgggggaagggcagcccagctggcaggctggaaagtataggattgggggcagggtgtgccaagtagggactaggggatgctgggagaacctgaaagccaggtttgctttgacctgtaaaatatataccttagtcccttgtcctggggtccaaaaccaaacaagggtgactgaagaaaacaccagatgttaacatccagcccctccacaaacactgacacaaacaagcacactcttgtacacacacacacacacacacacacacacacacaccacacacacacacacacacacacacaccacacacacaccacacacacacatacacacacacatacacacacaccacataccacacaccacacacacacacacacacacaatttttgaaaagtgttttctgctcaaactaacttaggaaaataccaatacatgtgtaggaaataggagacgtaactaagcagtaaagaacacatattaaagttctgacctagcaaactgtgggttagcaaaatacattgtaagatcaaatatgaaaactttaaaagtaagtaaaataaagcagtttttagcttggtgttcagataagagcagaggagctgaacaggatttgaactccagtgacctgtgggcactcccctagaccacacccactaaacaaccagcggtttatcaaaggaccaaacaaaggtatgctaatcaccccagctgcaccaacatacaccacttttctaattccaattagaatatatatatataatttctcttgtcaagtagaatcagtattttttttctgtttttgaaaacttcatttgaacaacatacgtttttgaaacttcaaatgaaacttcaaatgtactcagtgtctaggaagtaatttttccgcacgtaagtttggaaagcttttctaaggatgaaaattcacaacagacgtcttaaaacagtaacagtaaggaaccaattactgctaccattctttagggttggtttttgaagaccaggtttgactgagtgtaacccaggtcagcctctcaccatcttcctgcctctgactctcaaatacaagggttacaagcatgcaccacagtcccagctctgaactgtgattttaaggatgtttattgaaatattaaaagaaaaaaaaaacaatgctgacaagataggagatgtagtcagtgagcgctggaatgcaatgagtgctgtttatccacaggtgggttttctgatggtcgtccctgtttgaccaggcaaagtcacacatcagtcctttgagtccatgctgggattagactaaaggccttgagactgccaagcaggtgatctgaccctgagctatacctctagggcttgtatatctttactcacttctctgaattaattttgtgggagggacgagggagatgattgatgtctttttctctttttaaaaaatactttttaaaaacttaagaacaaagaagaattctgagcaaacttatttgtggcttttgtcaatgtagaatagttcatttatgcactgaacaaaatattttagtgcttacaaggtagagttagtggatctcattgatcttagttcagactttcacagcatttcctgttacatttatttacataattcataatacctaagtcatgagacatgatgtgagttacctatttgaatatatttaatacatatgtttatatagtatactacatagcatatgtgtgtggagcactcactattttaaaatgtcttttagagtagttttaagttcacagccaaactgagcagaaaatcctgctttcccacacattccactatatccctctccaggacttctctactgtcaaaatcacacactcgtgtgacacatttgttacaatcaatgaagcagcacatcgttaccacccaaagtcacacttagtactaacattcactcttggtgtactttcccatccatgacaagtgtatgtcatcgaccacgtggatcatacacaacaattggcaatcgctggaatcttttgttttttactttgccattctcagagtatcaatgttgacattataaagtatgttgactttttagattggtgaatgagaaatttctttaaagatgatattttccttgtgctggagggatggctcaacggttaagggcactggctgatcttccaaacctgtgcaaagcaagatctacttggtactcacaaccatctgtaactctagttctggggaaatcagatgggggaatcagacgccctcttctgttctccatggatactgcatgtccgtcctaccagggtctttttgaaagattaacaagtgctctaatagctgagccagccatctttccagcccctagagctctggttggaaagccaggtttgagcagactaaatttaaccagatgaagtgcaacaaagttgatcattattcacttatacccagttacaccaactttctttgtcctttctgtgttacccaccatactgcatggaatcctttgctgtaaaggtctaggaaagatttggaaaaaatgaaaaatgctacaaaatgctcaaattgagaaattcatatccttgaccaagttcaaggaagtattgagaacacacagcattgttttgtatatgactagcaaacacattttaagaaaaagaaacctggcctattatttttatttgtaagatgtcactgagtgtgagatgcatttccattttggattcttgaaaataatggattattgaaaatgtgttaagaatgctttaaaagtgggccttagaattgattaatcacaatcgtggcatttaaaaccctgtgctattatttctatgtatggattccatcctgctgtaactctattaaccagtaactctcaacaactggaaattaatttcgaagcatggttctttcccactgatttttcaccagtagaacaaaggacactgcaaaccttaaggatttttttttttttcctttttcttttttcgagacagagtttctctgtgtagccctggctgtcctggaactctgtagaccaggctggcctcgaactcagaaatctgcctgtctctgcttcccaagtgctgggattaaaggtgtatgtcaccactgcccgtcatttttggattattttttaaaagtaacttgaataataaacagtttaaacacagaacaattgtaaacaatatagatgtatccaggctgaagaaacaaatggaaacatttactactagcttctcccagttgcgacttaaagttagaatactcttgtttttccaccacagggattcattgaatttgcccagcctggcctggaacctgtgtgttcaagttcaggtaattctcctgcttcagtcccagaagtaactgggctacatacaggcttctcacacagcctagccttcatttccccattttcagtatcgtgcacatgcataattaaacgttttagtaatagcaacatttaacagcttttttaaatggagtaacgtaatttaacccagtatgactaaaatctatcatcccagcaaataatacaagatttatgaatgagatggtttgtcagcggtgtactggcaacacttaacagcctagcactgctcgaactagctacatttccataactctcttggctacatcttagccaaattacactcagctgccctagagaacgcacaatcttgcgcgaattcagcatcaagcgattcttccaattctgagtttggggattccttaaataacacagtctcttggctcctccggatttggccaagataaagtgtagaggcggcgcgtgctgcttagagacagtgcggggggggggggggaccgcgggcgcgggcggcggcagcggttggtagctgccgggcggcgagcacgcgggggcagctccacccgtgggcgcgcgggccggcaccgaggcgcgagggcgccgccccgggggcgggggcatgggcaccgggctccatagggctggggcagggcggaccgcatcgagccgggattcggacgccgnnnnnnnnnnnnnnnnnnnnnnnnnnnnnnnnnnnnnnnnnnnnnnnnnnnnnnnnnnnnnnnnnnnnnnnnnnnnnnnnnnnnnnnnnnnnnnnnnnnnnnnnnnnnnnnnnnnnnnnnnnnnnnnnnnnnnnnnnnnnnnnnnnnnnnnnnnnnnnnnnnnnnnnnnnnnnnnnnnnnnnnnnnnnnnnnnnnnnnnnnnnnnnnnnnnnnnnnnnnnnnnnnnnnnnnnnnnnnnnnnnnnnnnnnnnnnnnnnnnnnnnnnnnnnnnnnnnnnnnnnnnnnnnnnnnnnnnnnnnctgtccgcggcggccggagcgggccgggccgggccagcgggccgggggatggcgctgctggacctggcccaggagggaatggccttgttcggcttcgtgctcttcgtggtgctgtggctgatgcatttcatgtccatcatctacacgtgagttggagggtcggggcctcggggacgagctggactggcaggcgtgtgtgcggtggagggtagcgttttgcggggatagagaaagctgatccccaaacggccccctaaatcggtctccttggggcggtgcgacgcggggtcctggaaagggaatcgcgctggagtcgcgacccgactcctgggttgcaggcgactaccgagctctaggagaggagcctgcttctctgtctggtggagggttgtctacttggtttgattgtgtaggagattcgtgtgatttttcttcccatctgggcgaggatgtatggtgtattgtgaggttttccgctccctccgcgccggccacgtctctattatggagatggtcctttacactcttccgggagctgatcaccaccaccccaggcttcccagtggattacctccttcctagaagagctatgtgtttagctaggtgtgtagcacctgcccgccttgaagaaggtccgtctccgagccagtgttataaagcatcgagtcctgtcagcgtggcatttcagtatcatgtctttatttctttatcttttttccaagtctttatgtattggcttgtttggagttacatccttaatctgttttccacacacatctcttcatttggcaggtacctcctaaggcctactagataccacctggagttgggctggggacataggtgagaaagcaggacaaaactcctgccctcatgaagcttacattctagaaggatgaaacatgataaaaatctaaataaggttattccctataaagctcatgactaaaacagaacagagtgaaggggcggagagagacatgacataggtggctgagttttgatccatcaatgaaatgtctttaaaatgaagcctgtttaaatgtgtagagatgaactcacttggcattttagcctgaaagaggagggaggaaatttatttttatttatttatttatttattttaaactaccagatagggataggctagaataggctgtatgttaatgaaaaacagggaaggacgttaggcagttactttttttttccactatagaaaacatgtgcttttctccgattggtgtgccatttcctgacgccgagaaagacaacacctgtataagataagcagacagggttttgtggggtttttttgaaagtgaaagaaaacataccccgtttggaatttagaaatgtaagcagtattcattttaactacatgggctctttaaaaagcaatagttattttatcaggaatttagacagtacagaaaggaataaagaagatagttataacatactaaaacgttaccttgttaaccatttttgcctaccttcccaattaggtatatatatatcaggcagaagaggagagaggagattgtaccatgtcatgactgttgttccatggcctgctttaaaatctcccctactgactaaatggtgtttgataagcagtacagggcactgttctaggtgctagaagttaagcatgaagaaccaaacaccccaaggctgttgcttgtcgggagctgcctgcaaagcaacctgactattgtttttctcctatcaacaaatgtgtgagctctctccattagtgtaggaagatgcatggcattttggcttctgagcttttaatattcatttattgtttttggtaggcaattcagttgatttaagcaacacttaaaaagaaacagttatatttgtatttcttagctttttcctgtgctgggaaccaaacccagggccttctgtattttgggcaagtgcttcatccctaagatatattgctagttcctgtgatgaattcttttttttttttttccctcgagacaggttttctctgtatagccctggctgtcctggaactcactttgtagaccaggctggcctcgaactcagaaatccgcctgcctctgcctctggagtgctgggattaaaggcgtgcgtcaccatgcccctgctctgtgatgaattcttatacatgcatctctttaaatcacatttcttagggggaaaaagtattggaccagaaatgatacatcttttaatctttgttacaatgttgccttataaaatgtgatagctattcctagtcctggccatcaggtgatgggtatttccctgttctgtgttccttattcttcactatttcttctgttttgattttcatccatgtagttattggttccactaagttgcttttcagatatgtatatgataatttcatttagtcataaattatgtggctatagtcttttgcttatactgcagtctattaccaagctcctgtgtttttgtggaggtaactcctatgttaatctgtcacatgctgttgcttctcctgtctattttattgtctctcaccttgaagctagacaagtgttctgctttatgttcccttttatcgtctgcatttccaagtattgtatatattaattatatgtttgttagtctgttttcttctactgttgtgaattttcccttttaattttcacatactacactgtgatttttctcagcatttttcttaattttatttttttattctttttggtttttggtttttcgagacagggtttctctgtgtagtcctggctgtcctggctgtcctggaactcgctctgtagaccaggctggcctcaaactcagagatccacctgtctctgcctcccgagtgctgggattaaaggcgtgcgccaccaccaaccggctctcagcatttttctttgttatataacgagatctagaaccctagttaataatccttttctgagatagggtcttactaggtagctcagcttatcctggaactcataatgtaaaccaggctgaccttgaactcacggagatccatctgtctttgccagggttctagaattaaaatcgtgtgccaaccatgcctagttataattttacattttggagcatagtacaaatattagctttgttgaagtgctgtaaaaaaagctttgtaataattattattttttttaatactccagggtgttacctttaaatgttaaaacattgtgtgtgtgtgtgtgtgtgtgtgtgtgtgtgtgtgtgtgtgtgttacaacttcacaaacaacctgcaagagttagttcaattttttcccttataccatgagggggctcggggctggggattgaactcaggttatcaggcctggtgacaagcacctttacctactgagccatatctcctgcctcaatgttaccctttttatacacataagagcatattctgggttgagagtgctggcacacaggcaggtagatttctgaattcatggccagcgcggtcttcatagtgggtctcaaggccagtgtggtcttcatagtgggttcttctaggacagccagagttgcataatggagagatcctgtctcaaaacaccaaaatcaaacgaaagaaaaaaatttcctggaaagagatgtgcaaatcaaacacccaaagtgtctagatctcattgtataacaaagaaaatactgaggaggaaagtcacagtgtaggatgtgaaaattaaaaaggaaaattcacaacagtagaaggaaacagactaacatatataattaacatatataatacttggtgcatatctgtaatcttagcacttaaggctgagacaggaggattgcagtgaaggctagcctaaggaatattataagaccctgtgtcacaaaaacaaaaactttaaggcaaataactagcagtcaaatttgtatatagattcagccgtactcttcctgaagtttctgatatttgtttgataagctagttagtttctctctctctctctctctctctctctctcgtttctttctttctttgcagtctggtctcattgtcactttttttttatgtatggtttcattaaaaaaaaaaaatcgtttcctagtttgatgggaattgttttcaggtggagaacaaggttgttgttgttgttgctgttttgcttgccctctcctaactggacatgtaaaattgcagttgagtctcagcatttaacaaagttaaaaaactatggaaatagtattttgtttaaaatgctgtgcagaatcatctttattttattaaaaggatgtattttctgagtatatgttctgtctgcatctcggctgtccttttaagacaaagatgtaagcagatgttggtgccctctccctgaaaactcgtgcttgccgctggctgacgagcagttgccaggcttctaaacacctagctttgtattgggtgtcaggtcagcaggagggccagctcccaactgttagagaagcatgagcagcatcaatacgcaataaaagtgtatcaatggcacctgctgaatccgttctagtgtatcttcttctagttagagaaaagtcttggcccatgttttcaacagtggagctaacctttgattaatacattgactgtctcttactcaatgaagttatttgttctgatttcacaattcccataagcacccctccccccaataaagggtggttgtctataaaatggaaacaggtgtttcccatgttttgaattggtctctactgatggatatctatctctaccacccactttgttcctctctaactttaataccaaatggagacacaggcatttcacagtattattttagatggcagatatttatgggaagggtcttatttccccgatttttgattttccaaaaatagcaggtgattatagtctcaagcagtcagtgtgagctaagtggtctttatgggttactttgtttttccttttgtcagagtgagtttggtttcctagttgggaactgaaatgaagacatacaaaggtctgaaagcagttgtcttcttcccctggaggcatgtggaagccatcctttgggatggttgatctctccccatgcattcttgttctctcttcttccttctccgtgtactgcttgtctttcccctctctgtgggtgctctactgatgagcattagacactcatttttggttagctgattggaagtgacaggccagcatgggaatagtgcttttaaaaaatttatttacctttatgggtatgtttacttttatgggtattttgcctgcatgtatgtttacttagcacgtgtatcactggtgctcgtaaaggccagagggactggtgttacagtcttttttaattttctggtgtgtgtgtgcgtgtccgtgtgtgtccgtgtccctggctgtcctggaaagcatgctctgtagtgcacgctgaccttgaactccggagacctgcttgcctctgcttccctagtgctgggaccaaagtgatgatcctagagagagtgaaaaatacaaatgataacccagctttactgttcagtagtggctgtcttaatggttgtcctctgctccccacacagttggttccattcatcttcatatctccctttctgcttcacttttcatattgtaagctagttatcatttggaaatcctgggtcatgtgcttcaaatcttacgtgactcccaatgccttcaggttaaactcagcctcttgacacaggtcactgggagtggagccaggaccctgccccttttcttcaatggcattggttactgcggtcctcgcaaggtgcactattttgtctccagggttatcgcgccttccttccctttccccttccttgccccttttctctctctctctttaaaacattttttttttctttttactaattcaagacttgcgttttgtgagtgctttggagtgtcacttctcatgtcttcctggggcttgggagacattactcattgaagcagagtgatttttctctttcctgtgtacattgtaagtttttgaggatacagatattgactcatttaccactgtgttttcaggatctactaagcattaaatcactacttgtttaatgaatgtgtgatcttttgagtttctctaatagctgtacacacatacacacaaacatacattggtttcatgtaatacgtaaagttatatatatgtcatatatattatataatggatacatagccgttatttccatctctctggtggtaactgcggtttaaggcaaatggtcaaaatttgggatgtatttattggacatagtttttttttttaaataaagttgaaccaagtgaaatcttgttctcactttgtctaaaccagttgtaggtgaaataggaactgattacatcagtcagtctgtttacatcagtctgttaaagatttcctaaggaatcagttgtcttgctaaaaaataattttacattcagttctgccctttggtgaatgcagagcccagggctagccagggttggcttacaaatataaatgccacagagggtccctcttctctctccatccacagtgttttcagatactgaataatttaaaggctagggtctgctttgaatgggaattgtgtacaaatagggaatggttcattacttctggtggcttttgccttcatggtatgttgtgtattttttagcattatctggtaggtccttcttatgagctccctttgttggtagccatcagtaaagcatcactgtcagtttcctgtggaccaagttaattgtagcttcaccagagggttagttttgtttgtttgtttgtgaggctggtattgagatctcctgctggctgactcttttacattctgtgatattcgagtccattgtccattggagacactttgtgctttcctatacggttagctagctccctgttatctctctttctcaccggaacctggtgtcagcaaagttacagttgcactaagataggcttgagcggctgtgaagcacattcagatgcccatctcgaaatgctaagagctccgtggcaataacatgagtcacgacccgacccacactgatcataaacacagcaacagccttccagagtccaattatgtgtggcagtgatggcggccactaatcgttggggataactgtcatgggcaagctgatcccacagtcagcccagtttgatgtgaaatattaacaagcacagtgtggaacacgggggagaaattctggccttggagcacttggtttattggaatcacacagcacaacttataaaacaaaaaacaaaacaaaacagaaggagcatagtctggagctatgaagccaggtgacctttgccctggaaggctatatactctgggaagcaaaggaggtgcctcgccttgtttaagattagtctgccatccccccaccccaccccccagggctgctccctctcttctgggcttctatcctgccacagcttagcccaaacaaaattgcaaggggtgggggtggggggacatcaagtcagagctgttggtgagtaagtctgaaagatgggaaggcacagaggatgggttacaaccaggaaagcctcaactgtgcttgccagagacttggatgtcagggtgaggccgacattcagaagcccccctcagtcggggggagttggggatcaggtcgaagcacatggagcttcctgcagaagtctcctcctgccaccccttcccctgctgctctgaagagacccactctagttcagtggagaaggtgggactccaaaggctgttccttctttctgcccatggcgtttggactctactccagcttcactgccctgcagctagcagggccagccttgcccacggcgcttataaatacctcccttcctggccttgacagtggccttgcctcaataacctgaatgcctttgttattgtttgaaggtgacactagctcccagttggaagctttagtctggaaataatttctcttgaaaaagtatacctttttttttttttttttttagaaaatttactgcatttaatagctcccaaattgcccacttaagtttgctcaataaagagtgaaaccaaagccactgcctaactgtataataggaccattcactccgtgctcagtgtattcttgaagttgtaataaaagctgatttatgaatattgaatggatatatttgttaaaaggggagatacttcactagaaaaagaatattgttaagaagctagggccatgcagtggtgatacacacctttaatcccagtactctggagatagagacaggttgaactatgagttcaagaccagcctggtctatagagtgagttcctggacagccagggctatactgagaaaccctgtctctgaaaagcgaaaaaaatattattaaaatcccaatcagagcgcatacttcccctaacaagagctagccttccaggtattacagtagtcgtggagaggggcgctcacctcaagggcagtagaaagctggtgggtagtctctgctcctgaggactgtactagactgtactatgcagtctttctctctctccatatcctttacagagtgagattagcttggacttgcatactaatgaagaattaccttgaatattgtatctgctataggacagatattatcctgcctgtgtctcaacttcttcacctaccaggcctaaatgagggagttttttgtggtttggggacccaacagctgagacaggttcaaaagatggcaggtacacagagttgggactctgcagagcctctgtctagaaaactcatctgtcttagaagagctttgcacaaaccaagctccgcacaaaccacgcaaaccaaagaacactagcaggccgttcttaactcgtaataatttgttatatttaatgttttttaatctcatgcttgtattgtgatactttcggatgtccacagaacatttgtttactgcagtgctgggaattgaaccccaggcctcacctatgcaaatactcttcccctgaactatgccccctaaaacttagaaattgaggttttagaccatattttcacttactgtgtttttgtttttgttttagaatgatttatttagtttatgtatatgagtacactatagctgtcttcagacacatcagaagagagcatcagatcccattacagatggttgtaagccaccatgtggttgctgggaattgaactcaggacctctggaagggcagtcattgctctttaaccactgagccatctctccagccccacttactctgttttaatcatttaatcatttgtgttctctctctctttctctctctcacacacacaatctatttaatttctgtttttctctcttccactgtttgacatccttaaatttaaagtctctgaaccctgataattcagagaagttgcaggtggcagaaaatgtccttgaatgccaacactcatccttttttccccccatttgtttgtttgcttgtttgtttgagttgtatttggtattagctgtcatcaaatgtttattttcagccagtatttctggaactaccctgccaggtagacaccattatgcacacataaagaaacatcttgcccacgggcacactgctagtgctctgagttagaaatcctggcaacctgccaccagctcaggcttcaaaatcggctcagctgtgcactgccagaggcaacctaaaaataacccggaagtgaactgaagtggaccacgtggtggctatgggacctatctgacagtgggtgacaagctcctcccctttcacagaacatgtgctgtccctccgactcatctgtccatcttacaactgctactcttgggaaagtcccacctcccgccttttctccttacagtcaccaggtctctggggtctccggctcggctctctgctttgcactttggagtggcagggaggagtttggggacttaagaaacctcagttgcctggttctcacccctggaggttcagcaccaggagtttttaaggtctgtgggggattttgatgaacagcccctggtggctgtttacccacaggtgtgtcctgcacctgtcacctgtctctctccacttccttcacttctccacttacttcaggacccacagtttgccctcaccctttgccttggctcaccttgcttggcatcacgtatcagtctgtccagttgtcctggatccatcccgtggctttagcgtctcagatttcaggatcttgcagagggcggtggcctgccatgtggacaagcactacttcacattcacggcctcgggtcccggactggcagcacttgctgtctgtgtttagtgctgtctgttgcaccttctgtgtcgtcatcatcctaccatatttttggcagatagtttgaatttttggcttgtgttgtggatcctatcaggccaatggcgtttttttcttttaccctctgactagctctttggccctaatctgtatatgcagacattattacaatttccccccaggaaagtcctgtcccatctcctggtcccttctcaattctgtagttttaggaaaacaacagtttcacgattgttatatgtcacctcccatttatttatttttctttttgtaaagtttttaaaattatgtagtatttacttagtgtcatatgtatttggggatgccatggtaaacatgcaggggtcagatgggcagtgttcgagagtcagttctctttgttctatgtgagtccctaggtctgcacccaagactgtcagtcagtcttggcaataaattgctttttatctcctgagccatcttgttggctctaggtacttagtttttaaatctgcttttagaaatctgcctacttctgggctgcatctgatgcctcctaagagtgaacatttcatttcctgacctgtctctttggcagcatctattgctgttgtttaaagagacctcaacatttgtttttatttatgtgcttgtgcatgcctgcttgttgtgtgtgccatgttcatcttatggctgtcaccacaagttccttgagtccaaccctgagtcatcagatccacacgatctctccagcatggtcacgcaagccctgtgctttcttgatctgcattttctctcacccttcccttcctgtgtgcctttctgctggtgttttaaactatgcggcctttctttgcttttctccttctggatggttagagcatctcaccctgccttccactcccctgccttctgccccactccctgtactttgctcttccaatttaaagcacacacacacaatcccagtcgtcatctgatttgggtcttccctggttatttcttgctgtcttgtcaaccttgcctgtgaaatggaagcagagttcacagtggggaagaggcatcggcacattgggatatgctaaagtgtactttgtatttcacaagttgggaatggtgagggcagtggagtggaccacacactcaggccatacccagcaaaacccttgtccttcacccacctccatggtggttcaagagtgctttgctggtggtaccctgttttagcactaatttgaccaaagtgagaaatacctgctctaagcacttggaaccactgtgattataagcacacacgggaagtctggtgtcttagaagcacaacgacaatgaaaagcagaccttgagtccctgtgacatccccaggctggtttcagtgtcctgatttagccacccattctgttttaccagggttttgcatgcctggccatttttacaagatggagacattttgaatttcactttcctgagttctgggtattttcctgcactcagctctgtctaaatgcaggaactgtgcctgggctcccaggccagcacgtggccaggaggtgatctcaaagaagtagtgggatggttgtggcactctcctccttggagcctgtgtctcccttgacctagtagtgctcagtgtctgtaaccaatcttttcaagattttgtcagaatgtatttgggtgggagggcaaatccaatttgtgtttctttattttgtccaaaagttgaagtccagagggaagacttgggtttctgatgctttgttaagttaaaagagagactgcatgctgtttgtaatagcctcaaactaaaagcaaccaggtatcaacagcaggtagatagatgatgcatgcacattaatagaaggaattctgaaatgaggatgaataagctatagaccatcagtaaaccattaatgtgggcaaatctcactctaacataatggtaaacaagagaagccctatataaaagggaattggacatgcagagggggttctggtaatgctgttatttatgacctggtcacaggctgcagggagttctatcttagcaaactccttgaggtgtttatttatgtcactttacattagttaccaataaaaacaaacagtgtgaaaaatggtcaaggacaagccgtatgcagtagtggttctgcagaactgggttcccagcgtgaagcccggaaggggaaagtgccatcgagagtcccagcaaccatcaagtcacctgctccaagttgctgacaactgagatcacttttgaggcaccacgcgagtgtctatttacactattttgagaaatagaactgtggatttggtttatgacacactggtccccgtctaaggagttctttctgtatgggagaggtgtgatagacaaaggtaccctctcctaactctagacgtaggtttgttgacatgtctgagttgcgtggagtatttgtacagttctctcctttaaactacaagtctctgacagtgtctgttcatcatgtgtgtgtctgtattcaagtacaaacggtaacctagcatacactggggctcagactctgttgttcaataaaagaatgccaagcatagtgctaaatctgcatggttttggttaaacggacattcttttgtgcttttgataaatatttcaagtaccccacaccacagagctttgtcagttatattacataaagtcaaaactgtgttctccaaagtgggattgcatattctagggagggtgtactccgtattgaccccttggcatacagaaaggagtatggcagggactggctaggcagagagaaatggtagtagatgaaattattaaggttctaaactgtggtttggttttaattttgtgagaaatttctgatatggcctctaacaattctttttattcataagcctagatgtgaacagtactgcattatcaatataaatatcccgagaaaaaaaggaggtgtatagtctttttttttttttttttttttaattttcaagacagggtttctctgtgtagccctagctgtcctggaactcactttgtagaccaggctggtctcagaaatccacctgcccctgcctcccgagtgctgggattaaaggcgtgtgccaccacacctggctgaggtgtatattcttaaagcaagatatctttataaaaagaggggaaaggaagtagagcttattactctaagcttatgcccaaatctaaaagttgcaagactgttttagttcagaaggtccctgctgctgctgctgacttaattacagccttccagatacagtgaattattaggggactgagtttgtatataaattgattgttcagcacattcacatgagagatttaagacaatgtcttagcatgaaatggaccaataggaatgaatcaccagattttatcagtgtagggattcttcaaactaaaataactaccagatgattcatgtcgcttttgggtagataccagcaggcatccaggtcagcatatagtaaataaatatacctacaaactcatatttattgaggtatatttgcaagagtcaagctacaaagcctaatgagttatccatcagcagataaatggataaagaaaatatggtatacattttattcagccttagagaacaacagaattgcaacatttgcaggaaagtgggtggaactggagatcatcgggttaaaagaaattaaccagactcagacaaataccatttttttcttgcatatgcagaatcagatgatgatgatgataatgataaatgtatgtgggggtgcattgatcactgcccagatgatcaccccattattagggggaaggtttttattgtgaataagagaatatcgggagcagacagaaagaaagcagactggacatggccagaagcaagagaaccgggagcacagagagtagtggttggaggcagttagggtctgtgccattatagagaccaaacgggaatctggagagagggaggggagcctgagctgagaaggactagcctttgagaagtgtaacaagtacttgtgagcagagactgaggaaacctggaggccagcatgggctttgaaatgcaatcactggtgcacaccccctctccagaggcaaaggaaatgaccttttggggatgggaagcccattttggggatgaggaatgctggcttttatctaaccaccagaaatccttctatagtnnnnnnnnnnnnnnnnnnnnggggagagagagagagacagagagagagagagagagagagagagagagagagagagagagagagagagagagagagagagagagaatgaataatgggagcagtgactgtcgccaaagtacactgtatccagatagaaatagatccttttgatgagtgaaaacgggtcaataagttgctagccttagaccttctcatcctgttatcttcgtcatattctcttcatgatttctgggtgggtttgggggcactttattctctctgatgcattttgggattttatcttccactactgtgtgcagtcttttgtctcgtgtgaatggcatgtagagcaatggttctcagccttcctaatgctgcgaccctttaatacagatcctcatgtttggtgacacacacacacaccccaccccaataacatcattttgttgctacttcatagctgtggttttgctgtcatgagtcatagtgtaaacatctgtgttttctgatggtctgaggtgaccctgtgagagggttgttccacatcaccacaggttgagaactacagacacaggagccgtgctttgttttatgtagtcctggttgtcttgacagtgtcatattccttctccaggcccaagaccgcaaagatgttttctaggaaaacttttgtcttcatagtcttatgttcggtgtaactaaatctaagataagtagtgtctccaacttcctctcagggctcagagttttctgctttgtctttcaagaattccagacacaagggtgtcaaaccagatttctttcttaaagcaggctttttccagactgacaagctatagtatagtaataggagggctaaggcaagcttgggctccagcctgaagtcactgcaggagtaacagggatctatatatgtggcactcattattttccgtgatttgaaccatggcagctaaactgccatgtgaactttgttttatgcccgcagtccaggtgccctttactagatgactgtctgcaggcatccatctagtctgctattttgttagcaatgggggaaacatttttgtgtgtctgtggtcattagtgttagagtctgcttttggttgtgtttaacaccgtggatggaccctgtagatctatattctccaaactgtcagtgacacgtaaaaatttacattgttacaatctgccatggcgtggcactctgacgtactacaatgaaaaataaattgctggtcacacgcttgggtgtcgtggttatgtcaaagcgctacgttttaagttttctgaaagactttcttctatttcttctctttttttcttctatttcttctcattgcaaagcagtaaagcacctggccagtcagtctatacttggctagtggtcagtcatctagcttttgtttgctgctgtagatcagaagttaactcttcaaccttgttggtttctgttttttctcttgtcagtaacatagtttcttttacaacgatgtttctgtggccctaagtgaagcaggtgtttgctgaggagcactctgtcttcctgcctcagggagccagcctaagctgactgtctgtctgcatgtgtttcccttactggtgtgcttccaaatgtgtgcttgacacacttgcagcatctgtagtaccattctttgaagtgcagatgtgctgccactaatgggcttttgctcttctagaggaagatctcagtgggcttccccactcttggcaggactgctggctggctggagcacttgtaagatgccactgattccagagatgtcaaagcatggagacacctggatcccaggactcctcccaggcagatccaggagtgcccctgcatctgattactgctgatgcctggagcctggctgatgagatgggacctactggctctgtttttgtagaagtagggagggagaaactccagcatgttctctcttctccaactgactgggtatccctctttaggagctgtgataccttaggcatggaccagggtagtgaacctgagccatctgctcagtggtgctggtatatcttctggtgtcattaagacccccccccccttttttttaatctgagggttttttttgttttgttttgttttttgttttgttttgtttttttttctttctactctgccagcccgagcttattgccagtagacatttcatctgtcctgttctcaaagtgcgctcattacactcccatattcttctggcacatacagtgcatataaaggttttacctacttttatagctgtttggttacttcttggcagtttgagaagcagggtaatcatgcgtaggccaatattgtcatttgttttgtgtgtgggggtggggaggtgggtgtatgtgactatgtgtgtgagaaagagaatgtcccggtatctgcagaggccagatacaatataaaaacctttgggtttcttatcctatcggtttcaattttactgagacaggctttcgtccccccaccctgcttgactagactggtttgctggtgctactgtattcacatcccattgggattacacacaccacacccagctttttacatgaggggatctgaactcaagttctcatgcttgcatagcatcttacccgcagagctattcccccccccccccccccccccggcctggccctccaaacctgcccttcattgcctgtgagtgcctgctctgaccctgtggctcctaagccctgggagcacagcagtgaaggataaacatccggggagcatccatgtgctggccagcattggaacagccagcctgcctgcctgcctgcctgcctgcctgccatctatcctccctcnnnnnnnnnnnnnnnnnnnncctccctcccttccttccttccttccttccttccttccttccttctgggtttcctagaccagaagctcatttggtttgtcttttcttagttttcagtcaggtttccttgtcagaaagatgtcagctttggaaattctcgtcttggtgctggggtgttattattgcacagttggcagagggtttgcccagcatgtatgaagccctgggtttggtcccacaaactgggcatggatgtgcatgcctgtaatcctaatacttaaaaggtggtcagaggaagttcaaggttatccttggctatatgaaacccccctcttcaaacaaaaacaaaaatccaaaaaacaaaagcctcttccttgaggtgcccagcccaatgcttgtgggtgtgcctggctttgttctgcctgcctcttgctcctggttcttgtgtttaagcctttattaagatatctaacccaactctgttcagtgatttatcagtctgtgcttccttttggtttagcaccagcacattctctagaaataactcttgtgttgtttttgtgttttagccggttacacctcaacaagaaggcaacagacaaacagccgtatagcaagctccctggtgtctctcttctgaagccactgaagggggtggatcctaacctaatcaacaacttggagacattctttgaactggattatcccaaagtaagtatagtgctatccctatgagagatgggctacatcgtgggcttacttatttatttggggaattttaacactgtatgaggcaggagccttgttgttttataaacatcaaagttggaagttttcccagcctatattctgtaagtaaatgcaaagaaaggccaattttggggaatgaaagaatacgtgtgctgattgtgaaaacagcctagcctgtcccttggactcccatgtgcctctgtcgtgcagcgtaacctcacattttggttcctctgcatcatcccatcacaaagctcagagacctagttctgaggctctttttatattgtatcacatccttgtgtatgtaaattggcggaggagaaaattgtgttgctctttactatgaaatgagtaagagcatatgccagacacggtctctagacttccatagtctagttcagtttctgagttagagagcctgagaaatctgtcagaggttcctacagctacggggcttttgttccgacaggattctaccttaaaagcattaacacgatggtaaatgtagctcaaaatcatctagttcttaagtagaggaaaaaacaaatattcaaaattgccctgtagagctttgagttcagaggtgttttctttaaaatcctcctttgcgtgttctttttctcagaagttacacaaatgaattaacaaatgaacttgtcacttgccctgggccagcaactgtcgtagggaccagaggtcttacgtccttacagaatgtatattctgttgtaattcaaataacattttctgtaaaacctggtgtgtaagtaattctttataaatagtaacttaaaatatttgtacttgaagagtggaatgtaccccagtagggcccatgcctggcatgcacgaagctctgggatccatccatcaccaggctacacatagaggtgtggatggacagacaggttcctggtacatagggaatttgaggccagtagtagtggtggtggtgggtgggtatttttgcttgatatgcggtattattatttcatacattaaaacacatttcatgacttagggcatagcttggtaataagagtgtgtgcttagcatgtgcaagaccctgtcttccgctcccagaaccaccctcggaattctgttctgaatggtgttttgtcctcttgactatagacgaggtttgtgtcgtccctaatgtctgcaggtctgagtcaatgagactttctcgcacacttatacattgttatttatgcatctaaatttactcgtaaatacaaagggtagcattccatatactgcaatttcaagtgttaagttcttaaatatcaaaggattaagtattcttaatttggaaagggtttttgtagttccccatcttgcatttcttcacctgtgcacatctcacagtttgaaaagagaaggagaaagtgattgattgcagccccatgggcgctgggctgccttctccctccccagctgtcatctagatagtttcagtacttcaccagctcgtccatctcctgaaaatttagaaaatcagcctttgtaaaaatatcgtaaagatatattttcaatatgtactgtgtttttaatatgtatctatgtctagtcttttagaatataaaaaacacccaaaaagttactttgtgtattattagctaggaaagcttttacccacatctagtgtttggccagttataattggagggatttaactgcttcactgtggagattcttagcaagtaaaatggttccttcacagaccatgaacacacaggtgacgcctcattaccgtatggtgcttcagaatacacttaagggtggttctttcttcagtttgctagaattcttgttttctttttttttaagcctgtcttaagtgcctgctcctggataatgagaattgagttttctttgcagggtggccaattaagtcatttttgtttttaattttgggattaagtttgaaaggtgtattcacgattggaagtgttcaagccttgtgatgaaataaagatggcctctgtatctcccttcaaaaatttttggtatggaactagaggggcactcagtagttaagagagcagactattcttgcggaagacctaaatttaattcctgttactggcatcaggcagctcacaactgcccttaactccgactctgaaaaatcagacttttatggcgtcaataaaatgcgcagacacattttacacagagagatacatggtaaaaatttgattttctttttgtgactcggtttatctctttttcttctcattgagtgtattttactattacattttaaagttctgtcttgcttgggtaggaagccccagtaagccttttccatctgtgtgttacagtcatcgtgcttaggattagaagcactttgctcctccacctgcctgttcacacctgtcaagcagtgcatattataaaagcattaaggaattctctagggtgcctggctgcgtagcttagtagataggaagaaagctagctgtgaatttgccctttaaaaagtcacttagcctttctaatcgccattattaaggacacagccttcctccactaagtgttgtgagacatcagggctgcttgtagactcagccctctgggaagtgtcaggggtgtggtaggattggcacccttgctctctcagacttttatctggtcttttgaggccaggtgactgactgtatgactggctgaagccttcctgagtagcactcagtcatcactgaagtggatactgaatggaatagtaagtggtagagatcatgagaacgtgcccccgccccctccgttttcaccatctgcttaattattattaaatccccaccttattgacaaaacctttcttgacttcagccctggttctcttgtgctcaaccacagatttcttttctgccagtattttggtgaggtaagatgcatgctgaaggcattatgagtgttttgtttctgcgttttgcttttatatactcatcaatagaagtaagtaaagcaggatgggctgctccgtggcttgagtcagtccctgtgacttaagcacttccgaagttaccggacggttttggcagggccgtttcaaagctgtcagagatgcctttctaactaaacatagcatcgagcaaaatgaaattgcggatgttttcatgagctcagtgaagcatgcttttcatggtagtaaatgttcactcaaatgttattttatttaaaaaaaatttaaacagtaaaataaaattaaaaataaaagaaatgtaatcacattttgtcctttatgggattatatttaccatttgtagctccttcctgaagcaaggctggatcccaggcggagtttctggagaaggagtgtgcttggttttgctccttttcagtgtagctttttacactcctgcacgtcctgtaagctttgagtgcatgttaagtggtgcaggttgtgaacagacttgatatgcaggttgtcagtgggacggcccgtcagagagttggtagatgtcaagctcaggcactcaggctctgctgctggcagagatgtccgtgacccggacggagaagctgtctctctctgcccaagcagcacttgcaaagcagctgggtcccttcggattcctccctaaactcttaaaccttacgtacacagttacttttttttttctttcatctagtttttgatcactctagaaatactgacagtgtgctcttctttttttgtttttttttttttgttgttgttttttggtgggtttttcgagacaaggtttctctgtgtatccctggctgtcctggaactcactttgtagaccaggctggcctcgaactcagaaatccgcctgcctctgcctcccgagtgctgggattaaaggtgtgtgccaccacgcccagcttgcaccaccatgctcgactcagtgtgctcttcttatattacaagaggtttcctaatgttactctcttcttctgactagtatgaagtactcctttgtgtacaagatcatgatgatccagccattgatgtatgtaagaaattgcttggaaaatacccaaatgtcgatgctagattatttataggtaagtaaccaagtctatgttagccattttactttgttagttttaaattgcagtaaatcttcttgcacataaactctagattagggtacaaggctctcggtaaagtcaggcagcacgcttgctttgagtgtgttttctggagggctgaaagatttctattctatcaaggaaagttatgaaaaaaaaaaggtctgggttaccaaatggcacacgcaaaaataatatcttactcaggagtcaggtgtgagtagaagtagtagttgttgtcttctaatttctttttccttttctattttgatcttccctctgtccatggtctgtctagtgttgggctcttggccaccttagcagtgctgggcagggttccatcttatagagtgtgctttagttacaatcagctacttgttggttacttttcaccagcgtaccttgcaggccagtgtttgcctctggtagttctctgagtaacttccagtactgtgaacactaaccagcaggggtgaaggctctagatagataggccttgacttcttcatgtttagtgagttacataggtggtgtcttcaacagtggggcctcctcagcagtttgtggagagcaactaatagccttgcagtagcctaggttgtttgggggatttcatggagcccctttggccagcaacttgattagatgtaccccattcccagcatttgaggtttcacctggtggcgagagatgtctgctcggggctttggctccagttatttggtgatttctttcatatacctatccatctgctgaagcttcttctgtatcgggtttccatacatcccttcaaatggccctaagttttagctgcccctccctgtggttcccatattgtttttgtttctaagatgttttcaatggtggtcttttctctgtataaaagtgaatgtgacctgtgttttactctgatagtcaatttctcctattgttgtaactagggtaacttcaaaatgagtcctgtggacttttttgtttgttggtttttgtctgcatttttttccctaccactaaataaaatgtgtttatgacattatgtagcatgatgctttaaaatatgtatttggcatggctaaatcaagttaattagcatgcatccttaaccctgacttgtgacgaggaatgtcttactgtctcacctttgcattttcaggtggcaaaaaggttggcattaaccctaaaattaataatttgatgccagcatatgaagttgcaaaatatgatctcatatggatttgtgatagcggaataagaggtgaggtttgttctattttataaaactgttcatttgacgatagaatgccaaaaacatcctgaaaatatattatttatcagtctatggtttgcccaataataatttactccatcatcatgtatggtatatgttaggtgtacgtggtaagattttaatttttttaacctaacctagatggtacatgtattaaaacctttgcatttgaagagaaaatcttaaccattaaaaacatagtgatagccactgtctgctctgcagcccttctccagtgtaacatttcttgttggccagtttgtagcctttgcgcttctgtaatacactattctaccaaaagagtcaaatcaatgagctcatgtttcctaaaatatgtaaacttattaataagcattttcatgtattttaaaacattatttagatggttatagcaagaagtttctctcctgggctaaaaatgtgtagatttttgaagttttatattctcagaattagtgactgatatttattaaatccaaatgttcttaattacattaatggacattttctaaaattctctctctctcttttccctttctctgttgtccccttttttcccccactaaattttagtcatcccagacacattaactgacatggtgaatcagatgacagagaaagtggggttggtccacgggctgccgtatgtagccgacagacaaggctttgctgccaccttagagcaggtaagtgcagggcttacaaaacgtgcttgtcacagcagctcctccctcagacctggttacctgacctcagctctgctgcctggtgtgggaccctgctgagagcaccattgtgcctaggaggaagttctcaggtccttggggtcacttactgctgagctaccccaccctgtggctgtgcataggggatgtctggtgaccctgtccccagctggacacatagcatcttcactgaattctagatgttcactccagactattgtcttctataatgttcttttcaacagaaagctacctgatgacatattgtaaagtatttagaaaaaaaaaaaagttcctgcaagtcctatttaaaagaaaaaaacccttgattccctgtttaaataagtatcttaagaaacatattttctacaaaaacaaaaaacaaacaaacaaacaaacaaaaaaaccaagaacaaaaaagaaacatattttcttttttgaaattaatatacaaagctctggattcctttatggaagaatgaaatacataattttgttggctctctctactccctctcctgtcttcctgcctctacttcttctccccctcccccttcacgtttttgtatgttttttgggttttgttttgtgttttgtaagttctggtacttaaccagactaaactagcttttcaccactgggctacgttttcaaccctttctcttcaaggttattgtcaagctcttatcatgtagagaatgaaaaacttgtagagacacagaagaggcataccaccccagcacccaaagggaaactacctctgcactgattagggacagtgaagatccacttctgtttgatcacttatggcacgtgtgactggttttggttttgccttcatacgcatttcccatagtaaagcttcattaaagccatatcttatcctggactgttaaacagaaagcaacacttgtctttgtcgcaagggaaaggctcttggtatcagttttgatatttatccacttcctcttcagcacatcgtacatctgtatattttcttgattcttctaattgccacagatctaagagggtgaaggcacattagtgttaggactttgatttgacctttggcaacttaatatctcccccccctctcttactcttatgcattcgtatatgtgtgctcatgtatgtaggaggatgagtgtgcatatatgtaggggggcgtcagaggttgatatcgtatttctttctcagtcacttgctagcctgtattttgagccatgtttttgcgtctctcactgaaccttgaagcttctcggtttgactggactggcttggctggcctgcaatgcatgctcagcaccagtttccacaaagtctgggattgtaggtgcacatcaagtccagtttcttttttttttttttttttttttttttttggttttttgagacagggtttctctgtgtagccctggctatcctggaactcactctgtagaccaggctggcctcgaactcagaaatccgcctgtttctgcctcccaagtgctgggattaaaggcgtgcgccaccaccacccagctcatggtctctttcttaacacagccttgggaaatatttctctcaccggaagagattgttagtcttaaaatcttgagttatctggttgataaaaggaactacatgtaactgttttaaaatagaataccatcatgtgcttttaccttagaaacatgcacatagatgtctgtatcaatgaagggcatttcccagaatgcacccagtctactttacttagaatgaatggagatacaaccagaagactcttcctgcatgataaagaaaccttcaactgaactctagtcccgcctagtgctgtggcctcggataactgcttgccggttaagatggatgcttctgctctagaagttaggtttggttcaatcacagaaagctccattgcttcagtgaagtctccattgagtgtaggtagcagaatcatgtcttagctgccttgtaaaattctattactctgctctatgtgaataactgtgatgaagggagcctgctgctctgttcttgaaggtaactagaaaaggcagcatatctgagatataaatagtaaatagggctttaacaagggtctaacaagtagggtggtagtcagttccaacgtgtcacagagaagaaaaagtccaaaattaggggctggagcgatggctcagcagttagaatgagttctgttcttccagagaggaccagaattgagttctcagcacctaaaatgggcagcttacagtaacctttaactgcatctccagaggatcctgaccttccaatctataggaactcattcagatgtacattacccccgtagacttacatgaatatacagaatttaaaacaatttgaagaagaaataaaattttcctaaacattggtatcacctatacatgctctgtgtatatgcatagatacttgtacagacacacacacacacacacacacgccaccaaatgttgtaaaatcaggagacactaaatttcattaatattttatataccagttaatactcttttatatataaattccattttatttggagttatctttttttggttgtttttgttgttttttcttcttcttcttcaagacagggtttctctgtgtagccctggctgtcctggaactcactctgtaaaccaggctggcctcgaactcagaaatccgcctgcctctgccttgaaagtgctgggattaaaggcgtgcgccaccacgcccggctggagttatcttttaatgtattgattttagaaaagatagtggttgctttctggccagggaatatgcttttcactctaaaggtaactttcttggtactgctgatagctgggtagtcagccagacaaatcactgcccgaactacagtagcgcaggggtgtgctcctccttcagcacgtcagggcgctcactcaatcacttgcatttaacagaaagctttagggaaagttggcaggcctcatagttttaacaccaaaacctaattgactatgtccatctgtgttttctcgggcaggtatattttggaacttcacacccaagatcctatatctctgccaatgtaactggcttcaaatgtgtgacggggatgtcttgtttgatgaggaaggatgtgctagatcaggcaggagggctcatagcctttgctcagtacattgctgaagattactttatggccaaagcaatagccgaccggtaagtgaactaaagtattttcagtatccagcaaattctattggcttactctttccgttccaaccatgggtttgggctgttttatttgattctgctagtgagtacaaaggttagtaattttggcagagcattcgcattcaatatctgttggtgctaataaagcaaataccgtcctccgtttccttcagatgctgtagtttgaagtggttgacaggaagcttttgagagaatgaaggtagaaagttagaaaaattaaagctcttggtgtaatcataagtcaatagttgcattttttaaaagcatcatttgaaagaaactgtctactttttttttttttagtttataggtatgagtgttttacctgcatatgtgtgtgtgtctctggcacccttggaggtgagaagagggcatttgatcccctggaactggagttcctgatagctatgagctaccatgtgggtgttggtaactgaacctgggccctctgtaggagtgacaactgttcttaaactcctgagccatctctccagtccaaaacttggaaatttcttagcgcattatttcatactttgctaacgagccacctcatcatttagcattcctctgacacagaaaatgcgtttgggtttaaaggagatcaccaccctgtgtgatttcttatttaaagattttttttttttaattttggttttggttttggtttttcaagacagggtttctctgtgtagccctggctgtcctagaactcactctgtagaccaggctggccttgaactcagaaatccgtctgcctctgcctcccaagtgctgggattaaaggtgtgtgccaccatgcccggcacaaagaattttttgataagagcatatttgaagttcttccatatggtgcttaggaagttcacagttacctaatgtcttctatgagacccggtccacttggtcacttttcttgtttaacacacacgcaggaatcggtcagaggcaaattgttgagtagagaactctctcactgagtatgttgaaaatggctgcactgacgtttcttacactataaacctaggggatgtggctcctgcggctggaatgtgataccaccgagggctgatgcaatggctgaagagcattcagagcatcagttcactcatctttgaggactgggctcgccctgaataccagctgcagcttacatttacagtgattaatgagtgcagaaccagtcaggcttgaatgtgtctgtcaacacaaacatagatcatattataattatcttcattttcagaggttggaggttttcaatgtctactcaagttgccatgcaaaactctggttcgtactcaatttctcagtttcaatccagaatgatcaggtaaatcaataaactatcattttataaaaggaatgtgtgatgtgtgcatgtgcttcatgattttatatgtgtgtgtgtgtatttaaaatgcacatgatgccaggtgtcatggcgcatgcatttaaccccagtacttgggataaagaagccatcgaatctcttagttcaaggtcagcctggtttacatagtgtgctctagaatagagtagccagagctacgtaaatagtctttgagggaaaaaaaaagattaatttgcttccagaaaagtttgttctgttttaagagaaattgaacgcctaaatgaattttctttaataattctgaaattaaaaaaaaaaaaaagataattgaaactaaagcactttagaaatagaaactaaactggtcaaagtatagaccatgtaaatgaatatacagatatttttatttactaaataaaaatagaaaagagattcataaaagccaaactgagaaaggaaggctgggatgtatctaagttgatagactgctttcctggcatgcagacagccctggatgtcaccacccacccacccacccctgcacagcttacactgggtgtggtggcatcaccctatagtcccaacatttgggagaaagaggcaaaggatcaggacctgaacgtcatctttcactgcctaagaagtttgaagccagcctgggctacaggagagaccctttcttaacaatacataagtaaataaaattaaaactgtttcaaagaggatagtctttccatgtcaaggttgaccatgtgtgtgagagtggccggtggggttcaggatggtgcccgtgcaggtgtttggtggtgagggttgctcagttagttttgtaagcaggctgttgtcttaaaatcctttttgtttgtttgtttgtttctttctttaggtggaccaaattgagaattaacatgcttcctgctacaataatttgtgagccaatttcagaatgctttgttgccagtttaattattgggtgggcagcccaccatgtattcagatgggatatcatggtcttcttcatgtgccactgcctggcatggtttatatttgactacattcaactcaggggtgtccaggtatgtgggtgcacaggaaagggttctcagtgatctggggaaggagcagcgctatttcagtttagaaaaggctcaagagagaccgagcagtctttagtttctgtagacagaaagctaaggaacttagtttgggacttagagttagttcagaaaaatgacgtgaaggaaatcttcaagctgagcctgcagttgtttttcacactgcttttactaatgatgatcactgtttttagacagacaggattgcaaggcagttaagtcacctctgacacctttgacatcagtggtgccaacagtggggtcccaggagtgcgtagactccctcccccaactgtgtgtatgtgtgtgtgtgtgtgtgtgtgtgtgtgtgtgtgtgtgtgtgtgtgtgtgtgtgtgtgaggtctctttgcttggatgtgcacgcttgttctcccttctaccaggcggggcttgaacttggtcgtcaggcttccttgtggaggcatctcagcagcctgagaatttcatcctttgtacctttaatctgacaggcagtcagttgatttttatttttcattctcagggtggcacactgtgtttttcaaaacttgattatgctgtggcctggttcatccgtgaatccatgacaatctacattttcctgtcggcattatgggacccgactataagctggagaactggtcgctacaggttacgctgtggggggacagcagaggagatcctggatgtgtaagaagacctctgtgactgatggcccacagtgcggaatggaagtgttataaattatgtttatagagacactttccagggtctcccttcagtagtttatcacatgtatgttttggtatctgctctttaatttatttgcatggcacttgcatctgtgaaaagcaaaaaaacaaaaacaaaacatgtctgtagtcttggccaaatagtatatcttgtggaagtagagaatcaaggcaattggttctaggaagtgggatttgtttttttttgttgttgtttatttttttaaacaaataaatatatatatatatatacacacacacacacacatatacaggactgctctgcagcagacactatgacagtatccttcagtagggaaagtttcttacctgagttcctctgaatctgtacgggcagaacagcagctccatgagagaagtcatggcctctcccctgtgtgaagtaaatgctatacagagagacgcccgctggctgagaaactttttcatgctttatgcctacctcttgtagttgttgcagagcaaatagaagttagaagttgtaatacggtagctaggccttgcaaaaacaaatggaaaactttttaaaataataataataaaagagctggagtctagtatttatataaatctgtgaggttttttgttttgttttgggttttttttttttgttttgtttttttgtttgtttgggtttttttgttttgttttttgtttttggtctcattacaattgaaccaaaagtggttgagattggtttttaatggtaaccatgaattgaaggcatcttttggaccaactgtcgttggttctgtcttgaaccatattaatcactgtgctgtaattaggagagctgaatctttccctccctgctcccggctcacccggcctgccccatctttccttcgctttttccagggggtgatgttgtacaagtggatgttttgtagtgtaaggaaaatgcatttcagacagtcacacaggagctattttcttacccgggatgtctgtattgttaataagaatgtaatttcatgatacaagtatttaatatcttttttaagtgagtaaaaatattctagctattggcaaatagattacagtagacaattagaggatatgatgaggttgactcttcaaatcaatcagtatcaagctaagtcgactgtgtgcgtgttggtttgttttccttttttttctttttttttactataacagtcttatttaaattggatttttgtattcagtttgtatgacagtagactaggccagcctagctgtaaatgcatgctacactttcctctccgtcatgcagctaagcttgcttgtcagcccgtgcttaacttgtggtgaactggacttttgtttaaaataagcaaaactgtaagggacagtgcatcggcctttccccgtcttcttaagtagaagtttgctcatccttccgaattcgagggcgtgttatccatctgatgcttgctgttaaccccagcacttggcagcttcccatccatcctgtgttactatggcttccatctcagcacacagtgtatagcctattagcaataacttcctatgtatagagaacattttcatcttactgagccagcccatttgcctaatgactatacagacagtctaaattgcaatatatctgtaaatgtgtatatactataaatacacaatatacttacatttttctgggccaaacagcgtttcctttcccctccttttcctctcccctctcttgccttatgatgaatttgtttgagggcattttcttcatgagcaaaggcttggatgcatattcctaggtttgattttgtttttgttttttttctttctgtgaaatgggtattattatccccaaggagagctgcgcagtgagagccagtctagttatgacccactacgtgttgttttttacattactctttgatgagtcgcgttttgctgagcacgtttgttgtctgtcggtttgtttagtggagtttggtggatgccctttgcactgctgaagtgaaatcttgctgactacttagcttttttgttgatctcagtatgggcaaagaaacaaaatccaaatggctggacagacttctgtaaatattttttaaaaaaaacaaaacaaatgttctgtatgtgtgtgttttacgtggtcatgaagtatttccttaaagcgaagctttgagtacacagagagtaactctttgtttagcaagtttggagtgaagataaaatagcaagaaatactgtaaaatgtcaaagcaccacaccagaactgtaggagtccagatttataataaactgtctttttaaaaagaaaacaattacgtgtctagaatatatcatgttttattatttaaaatcattgtcttaagttttttgttgagagaataaaaaatttgaatacaatcaacgagagtaatggactggctttgtttacttcctgacatgttctgtctcagacatgttgccatattcatcttctttcttttccttttgttttgtctttttgagacaaatgtttctctgtgtacctttggctgtcttggaactctctgtagatcaggcaagcctcaaacccagagagagatccacctgcctctgcctcctgagtactgactgggattaaacaactcttttgctttcatttgtgctacactggacttacagtggggttcacctgctttggttgcaggtaataacacagggctggagaaaatgaggacaggcacctcacccacacatctgcattagtcattctgggtggggctgcacttggagaattacagacccttgatgactgacctctggtacagacccagagttccgtttgggagctcattcctggctgggcggcagcctgaactctgccttctcgattgtatcacttccacagatgaggaaggcaagccagtcccgaggaagggctggaaaggtcttgctgcctgaggtgctgagctgcaccccacacactgactgtccgggcttcacccaagctggaggcattcccagatgttgtgtgtcttgtgttttctccagagcaagctggctagcctaatcaacctccaggttcagggatagaccttgtctcttagtacataaacccttgatgttcttgttctacaggcttgaactgggttctcaggaagagcttttggtagttaaaatacagagcagcagcctaagaaccagtatgtactaagagttcacacagcctttcccagttctgggagacgctggcagagtctaggtgtctgggggatgttttcatgtggttgtgctgttaagactgagtcatcaagacatccgtgttaatagcatgaagatatgattacatgacttaaccaatttaggggtgtcttttcttggaagggttgagatctgtgcaccagcctcccctgaagaccacacctctccttgtaaatgatgtgacctgtctgtctaatcacaaatcctgggacttgtcgggactgacatctgactgccagagcaacagacaacacggtggagtctagtcaagtctgatgcaaacactggagcatgggaagggagcaggttagaggagatgatggctagacccggcatcatggccccggcctggaatcatttgggaggttgaaacacatcacaagattgaggctcagcctgggttacatagcaagatcctacttttgcatacttgaagtagagagatttgagagtcatttcactagaactggtgtccaaaggtgctgatcataatataggatcaacagacagagcaaaggacagaatctttgggagctatttaaaggatgaaagcatccaggaaaagggttagagagatggctcagccgctgtaagtgctggcttctcttccagaggaccttcctagcacccatgtagtttgttcacaaccatatggaactccaattcctggccacctgacatccttttctgacctctggaagcagataatgcattcaggcaaagcacctatacatgtaaaataatttacaagatccaagaatgataagcttccaaccctgaggttctgtgcccttcttggtgagcctgggactctggtcggcttccatcacctttctgaagcccagtttattactacatacagtgatgggcattgaagtcctcccctgggctgagatcatcagacgaggtatatcaagtatggtgatggtttggtcctttttctttccaaataagaatgaaattctcattggtgtatcttggaaagagattttagaaggacagggttggggcaggggtgtcatggatgatcgaatgggacaaggtcagtgaggtcaggagcaggtaccatccccagtgtggctggatctccattcgcggtgagctgtctcatacagtgagtatgacattttcatgtaggagtagcatccttgtgtttttcttaatatgtatttcattttataagagagaaaaggggagttttcagagctaaaagctgattctgcctcctgacaatgcccatttgcctcttttgctaaagaaacttgtaaggaaaggcatctctggggggtgggaggggcagattcagcagggtggagcccacagaagtgaaacatctgggcttaggagggcatgaagaagaaacgaaagtcatgacacatgtatttagaagctgcaaagacacattttccatccaaagttccagcaatactgggtgacaccaaagatactgacttgaattctcaagaaaaattctttgcacatgtgcacacatacacacacaccagccctggccacaacggtgtggctcattgcccacttggacggcatttggcttaacttcagcttaatatcgggctttggctttctgacttcattgtttttaaatactgaagttttgaaacaatagataaggtttcatttttgcacacccaattgtgagccactgaaatgtcacccatttcttgagaatgtaatagtagtatattcctataatatcacagagaatggaaaactgaagcaggaggatctccagcaatatacagtgagttcaaggccagcctgggctctacaacaagatcttcccttaataaaatcatacagaaatttcttaaccttatctaaataatttctttgcaagggcaggggcgcagagacagggcttctctacagagtcctctacatagccctggctgtattgaaagtcactgtgtagaccaagctggcctcaaactctcagagatgagcttgcccatgcctcctgtgttattttacatgactttttattttaaccatataaacaatttatgtgaccaaacagaagtctttactcttccaaactcaatatttagggtaagtaatgtttcctcaaggaaaagataggataggaatggaaataattaacatttgtacaagccagcagccagtgctcttagccacggaaccatctctccggccctcggttttaactttcaagtaagagtattttcatgctccgttttcattttggagacaaacggcattggtgctgcgctctctgtcgccatgaactttgctagcatttgctggtacaaactctgggctccagaggtaggctgtgctaattgtgcagtctttgccgaaggaaaaaaaaaacaaaaccaaaaacaaaaccagcagctgggcatggtagcacacacctttaatcccagtgcttgggaagcagaggcaggcagatctctgagtctgaggccagcttggtctacatagtgagtttcaggatagcctgggctacgtagagcagtagatcaacttcagtaagtcatgacccgctttgagggacactcactctcacaggggttgcctaagataccagaaaataggtatttacattactatttataacagtagaaaaattacagctatggagtagcaatgagaattattttatggctgggggtcaccacaaggtgaggagctgtatcaaagtaaagagtctcaggagtaggaaggttgagaaccactgatgtagagagacccaagtgtatctcaaaaacaacaaaaaaaaataaagacaataacaacaaataagagccgggcatggtgcacatgcctctagtcccagcacctggatctctgagagttggaggccagcctggtctacaaagcaagtccaggccagccagggctcagacagagaaaacatgtctcaaacaacaacaaaaaaagaaaaaatggaaaggaaagaaaagaaaatcagctatcctctgttccttaaaagtttgaagatatttatctgtaaacatgcccgggcctgacacctccatacttttctgtctacttgattgataggaactagttaatattttccccatttcagaagtcagccttagctgtctctacatgagaggcgcatgcagcatttccatagtcctctttgaatattgtcttttcgggtcgcagacacgtctgttccagaggttggcaatcatgctcatcggttctttggtctgagaggaaagtttcgggcacaggcgacggtgtctttcaacgactaagaaccttggccctgttgccctccctcgttttctgtttggttaacactagtttattctttcactctccggcaattccatacatgcgtatgatggatgcttcttagtcacctttgttcctccagtctctctctcttccttccccactccctccttcccaccaagtccccatcaatctttcccgtctttggttttgactttgttttggatgtcaccagggccgtgtgtgccggctcggatgggaagctatctcctgaagcatgagtaacttactagtgactaccacacggaagagaatggcttcctctcttacagcagcctcgacagccagtagcaccccagggcaaggtaggcccacacgcatgcccaccccccacctatgactagctgtcttatgcaagccactgtagctgttgtgagttcctgagtgtcacggccaggtcattcccatgggacctccctatcattctgctcttatagtctttccgccctatctcctatgatgttcctgaggctcggagggaatgatacgggtgtctcatttaatattgaacactcaacagtagtttgtccttagcaccctgacacagccaagagactcagccttaatctctgtttactgtaaaagagaagcttctttggttaaggttgaggacggagctagtctatgggtataataaacacagatttaagaggcaggttgataagatctccaattagcttgacaagagtacttggtttatccctagtggcccaggacttcctcacaagagggccttttgactatgtccacagttaccacaaataaactctgctctgggtctaatcagaaatcagttggttgggggctagtgagatggctcagtggttaagagcactgaccgctcttccgaagatcctgagttcaaatcccagcaaccacatggtggcttaccaccacccgtaatgagatctgaagacagctacagtggaattacatctaataaataaataaaatcttacaaaagaaaaagaaaaaatcagttggttataacctacagtcgtgccaatattgcatcaataaacaactgggaagttggcagagtagcattcaaggtctaaagctgagaaagactcccactgacttggctccgccagctgctatatagcaactgcgagtgttatcaatgctagacaatgagaagcagcacctgggtcaattacaccatggcttctctgtattctgcaaccaacatatggagtcttcaacatatgggtcttatcatcccattagccacaagcaggaccctaacctgtagtgttttagctggctatagagccttcttgctcagtgactcctggggacattccctcatacccagcactggagtttgataacccaaggcttctgggatcagcatgggacttacattcaaagtcttttttttttttaatatttttaaattagcttgtaaagtagtggacttccatgtaactatttatatctttagtttaagttagctctccccaatactccatcttctctctcatctctgtttagaccctgccagccctagtaatctattactctggggaacttaaaaaaattttttttaaattatttttaactctgtgtgtgtgtgtgtgtgtgtgtgtgtgtgtgtatctgcgtgtgtgtgcaagaaagtgtactatgtgtatacaatgcattcannnnnnnnnnnnnnnnnnnnnnnnnnnnnnnnnnnnnnnnnnnnnnnnnnnnnnnnnnnnnnnnnnnnnnnnnnnnnnnnnnnnnnnnnnnnnnnnnnnnnnnnnnnnnnnnnnnnnnnnnnnnnnnnnnnnnnnnnnnnnnnnnnnnnnnnnnnnnnnnnnnnnnnnnnnnnnnnnnnnnnnnnnnnnnnnnnnnnnnnnnnnnnnnnnnnnnnnnnnnnnnnnnnnnnnnnnnnnnnnnnnnnnnnnnnnnnnnnnnnnnnntctgctcaccccaaaatacgcacatgcacacacacgcacacttcactcccacctcacacacatactacactcccatctgtacacacacacacacacacacacacacacacacacacacactgattcttttttcacttccagatttcttcaaaaattccaatttaagcaaacaactataaaaacctgaagctctatgatccatataagagggagcacacagtgctcatcttgctgggttacattgcttaatataattatttccaggtccatccatttccccaaaagtgtcataatttcatttcctttacagatgaataaaatcccattgtgtgttgtgcatctcattagcctctctcctgatgggagtctaggtgaccccattctctagctgttgtgaggagggcaacaatgaacacagaccagcaggtttctctgcaatgaaatctggagccctttgggcatatgtagggtgaatcacatggaagctctagttctagttttatgagacccctctagactgatttccaaagtgattgtaccagtttatataatagtatataagtgagccaggcctcgtggccacattgttagccccagcactcaggaagtagaagcaggtctttgtgagtttgttggccatccagagctacatagaaagaggctctgtctcaataccacacacactcatacacatacacacagacacacacacaggcacacacacagacacacactcatacatatacacacgcagatacccagacacacacagacagacataacagacacacacacaccagtgaatgtacaaggttctccttcaccacgtttatgccaatgttcgctgtctgtcatttacaggcttaataatagtcattatgtctggaataaactggaatcatagagtagttttaatctgcactaacgtcactctagccctctgtgtttgttctaagagcaaagtggcaggtgaggccagtggttatctctggactcaagaacacctaggctgatgccccgtttgttgttgttgctattgtttgttttgagacagtatctcttgtcgcccaaacttgcctaggactctcactgtagctgagtctggccttgacctcctgactgtctctctacttcccctcccaagggctggggtataggctcctctctcttaaaactgcatggaatgagatgtacaggcaacacttaaggaatttcacctagtgagagtgtttcaagctcttattttaatgatcagctggttctgtatcacccagggaccatttccaaatgtgctctggctcggcattgatggtaatgagcacaaggtatccagctctttttggaactagccacctgacctgtcatcccatccttccacccccgcccccgacactcaccccctaaacccctgactttgcggtcccatcgttttctaactatgtaccagcaatcattttgtaggccaacagcacagcaggaggatggtgagttcaaagccagcatgggctacattgctagatgctttcagagatggagggagaggagagagagattggagtggggatgtgggtggggaggagttgagggagggagggaagaacggagggagagactttgaaagcgtgcacataggagtatttagagtacgagagctgtggttcagaacctaggacct

SEQ ID NO: 602 - DNA, 1386 bp, Mus musculus
ctgtccgcggcggccggagcgggccgggccgggccagcgggccgggggatggcgctgctggacctggcccaggagggaatggccttgttcggcttcgtgctcttcgtggtgctgtggctgatgcatttcatgtccatcatctacacccggttacacctcaacaagaaggcaacagacaaacagccgtatagcaagctccctggtgtctctcttctgaagccactgaagggggtggatcctaacctaatcaacaacttggagacattctttgaactggattatcccaaatatgaagtactcctttgtgtacaagatcatgatgatccagccattgatgtatgtaagaaattgcttggaaaatacccaaatgtcgatgctagattatttataggtggcaaaaaggttggcattaaccctaaaattaataatttgatgccagcatatgaagttgcaaaatatgatctcatatggatttgtgatagcggaataagagtcatcccagacacattaactgacatggtgaatcagatgacagagaaagtggggttggtccacgggctgccgtatgtagccgacagacaaggctttgctgccaccttagagcaggtatattttggaacttcacacccaagatcctatatctctgccaatgtaactggcttcaaatgtgtgacggggatgtcttgtttgatgaggaaggatgtgctagatcaggcaggagggctcatagcctttgctcagtacattgctgaagattactttatggccaaagcaatagccgaccgaggttggaggttttcaatgtctactcaagttgccatgcaaaactctggttcgtactcaatttctcagtttcaatccagaatgatcaggtggaccaaattgagaattaacatgcttcctgctacaataatttgtgagccaatttcagaatgctttgttgccagtttaattattgggtgggcagcccaccatgtattcagatgggatatcatggtcttcttcatgtgccactgcctggcatggtttatatttgactacattcaactcaggggtgtccagggtggcacactgtgtttttcaaaacttgattatgctgtggcctggttcatccgtgaatccatgacaatctacattttcctgtcggcattatgggacccgactataagctggagaactggtcgctacaggttacgctgtggggggacagcagaggagatcctggatgtgtaagaagacctctgtgactgatggcccacagtgcggaatggaagtgttataaattatgtttatagagacactttccagggtctcccttcagtagtttatcacatgtatgttttggtatctgctctttaatttatttgcatggcacttgcatctgtg

SEQ ID NO: 603 - protein, 410 aa, Mus musculus
LSAAAGAGRAGPAGRGMALLDLAQEGMALFGFVLFVVLWLMHFMSIIYTRLHLNKKATDKQPYSKLPGVSLLKPLKGVDPNLINNLETFFELDYPKYEVLLCVQDHDDPAIDVCKKLLGKYPNVDARLFIGGKKVGINPKINNLMPAYEVAKYDLIWICDSGIRVIPDTLTDMVNQMTEKVGLVHGLPYVADRQGFAATLEQVYFGTSHPRSYISANVTGFKCVTGMSCLMRKDVLDQAGGLIAFAQYIAEDYFMAKAIADRGWRFSMSTQVAMQNSGSYSISQFQSRMIRWTKLRINMLPATIICEPISECFVASLIIGWAAHHVFRWDIMVFFMCHCLAWFIFDYIQLRGVQGGTLCFSKLDYAVAWFIRESMTIYIFLSALWDPTISWRTGRYRLRCGGTAEEILDV

SEQ ID NO: 604 - DNA, 56219 bp, Homo sapiens
  misc_feature (1)...(56219): n = A,T,C or G
gtaatcactcccaactcccaatttttctcatacctctatatcaacactcattgcattacaatgatacatttttgcatttctcttcctcagctgaacttgaacttctccagggggaaaaaaagattatgttatttttcactttgtatccaaagcatgagaacactgtgtacctggaacatcacatattttattgtattattattttattattttgagacagaatctcactctgtcgcccaggctggggtgcagtggcgtgatctcggcttactgcaatctctgcctcaacctcccgagtatctgggactacaggtgcaggctgttttgcatattttgtagagatggagtttcactatgttgctcaccctggtctctaattcctgggcccatgcaacctgccagattcagcctcccaaagtgctgggattacacgcatgagccaccgtgcccaacctcatgtatacatgtgtgcacacatgcacgcacacgtatgtgcacacatgcacgtatacgtatgtgcatacatgtatgtatacgtatgtgcatatgtgcgtgcacacgtgcatgtgcatatatgcatgcatacacgcatgcacacctgtgtacacacgtgtgcatgcatgtgtgcatgtatgtgcatgtacatgcatgtgtgtacatgtgtatatgtgtatgcatgtgtgtatgccttgtgtgcatgcatatacatgtatgtatagatatgtgtgtgtgtgcatatatatattgttttttactacaaaaaaaaaaaaagacaggatctcactatgttacccaggatggtcttaaactcctgcgttcaagtgatcctcccacctcagcctcccaaagtgctaaaattaccggcatgagccatcatgcctggccaccttgtatgttttaatatttgttgaggaataaaggaaaataaataactaaacggaaaatccattaatttgtttactttatcaacttaacagtcttaataattttgctcagtgttctctattatagaggaaatgactgttaatgatggctcccatcattaactgttgatgactgttaatgagggatcccaaaatatttaaggtgggttggcaactgaatttaggcatgagcttatgtgatagggaaggccctaatagttgtttctatctccttgtattgcaaaatgctttgtttcgtgctttttcaggtattagacaacacttcaaatttatacctacaatgatataaaaggctaaaaacaatcagatatgatttccaaactataaaattactagactaggggaggatgcatccttttcacaaattagttgttagtttggtaccaatttgtgtaaatgctataacaccttttgccaattctgagcttcaaaaaataatatatttacgtaaacttgactctgaaaactttctctcgtgttaatcctgatgcatttaattatattttatgaggtacttattaccaaaaattaccaaaaatagtttaaagactatttgatatcactgtttcttaacatcacaaggccagtttgtgtacctttctaatattatgctggcatgtaacgaatattttctttcaaggcctgagatttatttttcccatggaataaaaatatctttgtttgctccttactattcaattatatgtctcctatttcctacaattgtcatctaattgcatttgtttctgattgactacaccaggtatattagcaagaagatgagatctacaatatactctggtttgtgtaataattaagaattgtaaagtattgcatgctctgtcacaaggaataatttgccaaagataaatccttctaataggtaattttattttttatgggttgaaacagtaaatggagaaatagagaaaacaaaagttagtaatgtagatgaaatgagacaaaatgaatgtactttctcaattaaggaataataataaaactttatatccatttccctccctggaattgttataaatattttacatatgttaacttgtttagtcctcacaacagtccatttatagacaaagaaactgaagcaagtggctaggcacagtggcttacacttgtaatcctagcactttgggaagctagggcaggaggattgcttcaggtcaggagttcaagaccagcctgggcaacatagcaagaccctttctctacaaaataaaaataaaaataaaaaaactgaggcgagagaggttaagtgacttgcttaggtcacatggtggaccagaattcaaactcagcctgtctgactttcacagtattcaggcttagccaatagtttatactgtaacctaaaggaaagcattcttaagatagggaaggtattttgtagagattctaaagtcaggaggtctagtttatcttaacaacctttgtttcttagtaaatgttaaagtcgccgggcgtggtggctcaagcctgtaatcccagcactttgggaggccgaggtgggcggatcacgaggtcaggagattgagaccacggtgaaaccccgtctctactaaaaatacaaaaaattagctgggcgtggtggcgggcgcctgtagtcccagctactcaggaggctgaggcaggagaatggtgtgaacccgggaggcggagcttgcagtgagccgagattacgccactgcactccagcctgggcgacagagccagactccgtcttaaaaaaaaaaaaaaaaaaaaaaaaaggaaatgttaaagtcaagttttaattatattgttggtaattctgtaaaatgatacaataagaaacagattttgttggaattttcctgaattattgtgtgagaaaaaaagcacttgaaaaagattgttcttttaaattcctttttttttgagacggtgtctcgctctgtcgcccaggctggagtgcagtcgtgtgatctcggctcactgcaagctccgcctcccgggttcacaccattctcctgcctcagcctccccagtagctgcggctacaggcgcccgccaccgcgcctggctaattttttgtatttttagtagagacggtgtttcactgtgttagccaggatggtctcgatctcctgacctcgtgatccgcccgccttggcctcccaaagcgctgggattacaggcgtgggccaccgcgcctggccttaaattcttccacttgttgtttgtgctcttaatgaactgttctgcaacgacattatgtttcataaaattcctcttaactgaagcaaatgatatggtggaaggaaagagcaaggtgtttaaattcccagagcatcttagcagaaaaacatgatataccttcctaagtctcagatggtgaaattgactttcctaaatctcagatggtgatgtatacattacattggttattaaactaaataatgctagaccaaaatctactttgcaaactgaattttgagagttgaacatctactatatgttgtttaaattaactcaatactgtacttgcttatttaaatagcattgactttggagtctgacaaagccgggtccaaactccattgctgtcacttattgaatgtcatctgggcatttaacttaatctttttgtcttactgtacagtttatgactgttgtgaaaatcaagttaatagttaaataatttccctagcatgtcatttatgttcccttgttcagtaaatattagtcaatctctctccacaataaacttactgagtttgtttacacacacgcacaagctgcatacatagtctaggtgaagattttagcattatgagcttaaataaactagaatgagtcataactatctatccaaaaataaagaaatttccaaaaacacttttaaaaagataatagttaaggccaggtacagtggctcaagcttagaatcccatcactttgggaggccaagatgggtgaatcccttgagtccaggagtttgagaccagcccgggcaacatggcaaaaccccatctctacaaataatttaaaaagtatgcagtgagccgagatcatgccactgcactccagtctgggtgacagagcgagactctgccaaaaaaaaaaaaccaaaaaacattagcctggtgtggtggcaggtggctgaagtcccagctacttgggaggctgaggtgagaggatcacctgagcctgggaggtcaaggctgcagtgagctgtgattatgccactgtgctccagcctgggtgacagaaggtgcttaagtgcccacaaggtgctaaaccctgggatctgatggcaaactagtaattctttttaagacagagtcttgctctgtcacccaagctggagtgcagtggtgtgatctcactgcaacctgtctcaaaaaaacaaaacgaaaaaacaaaaacagttgatatttacatggggcatatttgaacatcttttgaatttagcttccattaagaataaacattagtggttcgagctaggaaagtatggattaaaacaagattaagcatgaaattttaaaagaaaatgaatatgtgatttaatttaatttaatttatttatttttgagaaagtctcactctgttcccaggctggggtacagtggcacgtgatctcagctcactgcaacctctgcctcccaggttcaagcaattttcctgtctcagccttctgagtagctgggattacaagctactcaggattacaagctggtccaggagtttgagaccagcccgggcaacatggcaaaaccccatctctacaaataatttaaaaagtatgcagtgagccgagatcatgccactgcactccagtctgggtgacagagcgagactctgccaaaaaaaaaaaacaaaaaacattagcctggcacctccatgcctggctaatttttgtatttttagtagagacaggctctcaccgtgttggccaggctggtctcgaacttctgacctcatgatccgcccgccttgacctcccaaagtgctaggattacagtcgtgtccggccgagtatgtgattttaaaaaaaagattttaggcctggtgcagtggcttacacctgtaatcccagcactctgggaggctgaggcgggcggatcacaaggtcacgagatcaagaatatcttgaccaacatggtgaaaccccgtctctactaacaatacaaaaaccagtcaggcgtggtggcgtgcgtctatagtcccagctactctggaggcggaagcaggtgatcgcttaaatccgggaggtggaggtttgcagtgaactgagatagcaccacttgcactccagcctgggcgacaagagcgaaactccaactcaaaaaaaaaaaaaattttttaattaggcatttggatatgagttagcatagcagctgagaagaacacagcagctgagaagaacatgaactctagtaaactctagtcactcccctggaccacacccacatatataaacacaggataccagtggtttatcaagatcaggccctgaactgataatttgcctggaatctttgtatcatttaaaggcaatttacagtaacacagtatcttaggatctgaaggcttttacaaagttaccatttcatgcataacaaaccaatgtaagttaatcacctgagctgatagttaaggtatttttctacttaattctaaacatgtttagaaaaaagacaagaattacttttttcttggcattagcaccacaaatttcatgtcaattgattctttgtttatgaaacttcaaatttactcaatttctggaggatcaccttgttttcaccttattttttaagtttttatagggctgaaaatttacagtatgcctatcttttaaaaataataatacactcaccatagaaaactggattgtgatctttaaaatgtttacatgaaaaattatttataacaatgacaaagatggaaaatatgtgatattgagacgaaaattatgttgttgactgtcaagtagagtatgggctttggagcaggtcttcaggacgtgattagttgaactaatatgtaattactctaactctttagcttaattttataagataaaggaggaggtatggaagttaatgtgtatttttctcacaacgaaaaaccatttaaaaatctttacagacaaaggagaaagctgagaaatttttccagaaagtttttccagaaaatttcagaagtcactgaaatttttccagtgacttctgtcaatggataaataaacattttatctattcattcagtcaacaaatatttaagtgcccacaaggtgctaaatcctgggatctgatggcaaactggtaatttttttttttttaagtcagagtctcgctctggcacccaagctggagtgcagtggcatgatcttggctcactgcaacctctgcctaccaggttcaagtgattctcctgcctcagcctcccaagtagctggaattacaggtacccaccaccatgcctggctagattttgtattttttgtagaaacagggttttaccacgttgcctgccaccacgcccagctaatttttctattttttgtagaaacagggtttcgccatgttgcccaggctggcttgagatcctcccaccttggcctcccacagtgctgcaattacaggcctgagccaccgcgcccagccgcaaactggtatatcttattcagacatttatagcatttccaatgttatacacatatttgtatacatatataagtagaacacctttagtggaacactcactaattttttttaagaatttactttttagagtagttttaggttcacagcaaaactgagcagaaagtacagaaggttcccatatacccactgccattccctccaccagcctcctccactattaacatcttgcaccagagcaccatattcgttacaactgatggacctacattaacacaccattatcacctaaagtccatagcttacattagggttcactcttggtggtgtattttctacggggtttgccaaatatatgacatgtatacactattataggatcatacagaatagtttcactcacagccctaaaaatcctgtcatctatttgtccctctttcctctgctccatggcaaccacagatctttatactgtcttcatactcttcccttttctaaagctgttttaaaacgaagtttgggtaaacatagtttaactagggtcaagtataatataactgatctttaatctactgattatactcaatttagcaaatttgttaactcttaagaatatctactttcacatttctttggcctctttttttgtgttattggtcatactgtataaaatcctttgttgtaaggttccagaaaacatttttgaaaaaatgcagaatataaaacaatgcttaaattaagcaattggtgttcctcaaatctaagagggcatttaatgataagatgcagcattattttatatatcactaagatgcactattattttatatttgagtaaaagaaaaccacaagccattggctgggcacggtgactcacgcctgtaatcccagcactttgggaggccgaggcaggtggatcacgaggtcaggagttcgagactagcctgaacaatatggtgaaaccccgtctctactaaaaacacaaaaattagccgggtgtggtggtgtgcaaatgtagtcccagctactggggagggtgagacaggagaattgcttgaactcaggaggcggaggttcctgtgagcctagatcacgccactgcactccagccttggcgacagagcgagactccacctcaaaaaaaaaaaaaaaaaaaagaaaaaacgccaattaactctaagatggcattgactgtgagatgcattcccatttcagagaaattaaaatttgttaaagtgtttttttgaagtgtgccttagaattaactacaatcgtaaatttttgtttggaacgttatttcgatgttagaattctattccacttttttttaagacagggactcactgtcacccaggctggagttaagtggcgcgatcacagctcactgcagccgccacttcccaggatcaggtgatcctaccacctcagccttcccggtagctgggactataggtgccataaccatgcctggctaatttttttttttttttttttttgtagagacagggtttcatcatgttgcccaggctggtctcaaactcctggcctcaagcaatcctcctacctgagtctcccaaactgctgggattacaggcatgagccactgcgcctggccctccatcctgctatttttatcagccagtaactctcaacagtgggaatttgattttgaagcattgttctttcccactgattctgcaccagtggagccaaggatgttaatcgaggaatggttcggacattaactcttctagttgtagtttgtcatttaattgcagattgaggtagatcattcagtgactattaactaccataaacagcaataataaacaacttcttttcttttttttaaattcatctattttttttcgagacagagtctcgctctgtcgcccaggctggagtgcagtggcgcgatctcggctcactgcaacctccgcccctccaggtttaagcaattctctgcctcagcctccggagtagctgggattacaggcgcctgccaccacgcccggctaattctttgtatttttagtagagacggggtttcaccatctaggccaggccggtcttgaactcctgacctcatgctccacctgcctccgcctcccaaagtgctgggactacaggtgtgagccaccgcgcccagccacaacttcttttcaaaattgaattcaattctgaaatatctcaagggaggtcatggattatttaaaaggaaatcacttgcaacaataaacataaaacaatgcagaaatagtataaactcatctagattgaagaaacacaaacattgagtactagcatcttcttgggatgacttaaaattaggacaaatacttagttaccttactacccaaagtgacatttcttcccattttagagctgtgctgtccacacgtacaattaaaattttctagtagctagccaaagtatttaaaaagagaaattaacttaataatttacctaatttaatgtagtatgtccaaaatattaccttttcaacatgcaatcaatataaaatttactaacgagatggtcttccacatctggtgtactgtttactccacagagtggcaagctgcctttccaaccctcacttagccacatgcggctaccgtattggatggcagtcttagggaatttcaatatcaactgattctttaattctgagtttgagaatttctttttataatacacacggtcgctaaggcgcttagagatctgtgaggcgcatggagattattttactctccggtcccttttgatccaagatcccacagcattaaaagcagtaagagggaaggcaatgggcatcccttgcgcccaggaacgtggcctggagggcctggctgctccgagcagtagcagtgcccggcggggaggctgcagacgcggcgttggaagttggatttctagacaagctccggcagctgcccggaacccgtgtctttttctggggcacccaggaacagcagggccagacggagagagagcagcctccagccaggcacagggtcccgagctgccaccgacaccgagggagcccggcccagggctgcagcgctttccgcctaggtgggcggcagcgggagcgaggagccggaggaagcccggcctgcgtcctgcgggcagcaggacacgatctccccggcgcgctctcgccggcgccgcagcgggcgcgcgggcgacagggtgggcgtggaccgatgggggcaccgcccctgggagaggcgggcgccgcggttccgggggcgggacgcgccgaggagtggggcgcgagccgccggttttgattagtgcggcggagctgcggcggtggagctgctcggccgggagcccggcggcgagacggagaggcggcggaggtgcccgcgcgcagggtctggtgggcggccgcgaggctcgggagaggcgaaccggagcgcgggaccgcggtcgccccgaccagagccgggagaccgcagcacccgcagccgcccgcgagcgcgccgaagacagcgcgcaggcgagagcgcgcgggcgggggcgcgcaggccctgcccgccccttccgtccccacccccctccgccctttcctctccccaccttcctctcgcctcccgcgcccccgcaccgggcgcccaccctgtcctcctcctgcgggagcgttgtccgtgttggcggccgcagcgggccgggccggtccggcgggccgggggatggcgctgctggacctggccttggagggaatggccgtcttcgggttcgtcctcttcttggtgctgtggctgatgcatttcatggctatcatctacacgtgagtgagggaccgcaggaggggctcggggcaggggtccgggcctcggagacaggcgagaatgggaaacgtttgcgctttgaaggggactgggctcgggcgggggtggagaaagctgatcgtcaggctgttccccccgttccctcgcccctcggaccggcggtggcggtggtctttgcgagggaaaagtgttgggcgtgggaagggtttgctgggttgcaggcgactgcccagccaggctaaaggagactgctcttacgtgtcaggctgaaggtggtggcttggtttgattgtgctggggattcgtgtaatttttcatctgggccgagatgtatggtgtattgtttttttctcccgacctgggccacgtttctgttagggtggtgattgtgtccacttttctgggagctgctcacagctatctggacacctctctgtggattttcttcttcctggaagggctctatgcgcttagataggtgtgaagcacctgtccaccctgaaaaatgtccaccaaacctccgagctggcatgatagctttgagtcctgtcagcttgtacatctcagcgtggttttctttccttttttcagttcctcgttttattgttttatgtagatttgtactctccccgtgccggccacatcttttcatttttgtttaacaaatacttcttgaggcctactagataccattcactgttattggccaggggacatggtggtgagcaggacagaattcctgtcctcatgagtcttacattctagaaggaaggagcagataaaatctaaataaggttatgagattgtgacgaagcgtgtaagtaaaatagaactgggtgatggcgtgaatagagacatgggttatgtggctagtttggtatatccactgtttaaggtgaaatctgcctctgtaaagaaatgaaaaaattatatagagcacattactgatatcgattcacttggatttttagtctggggggagaaaagagcaattgtatatagtaatcgttaccatgaactagaatagagtgtatgttagtggaagagactttaagaaattagttacttttagttttttggttttttttttttcctttttactgcggaaaaagtgtgcctttgcttttggaaacactgtattttattagtatagtgtggcatttcctggtactgagaaagatgatgctggtacaggttatactgatatttctttgaaagtgaaagaaaacatgccacttggatattgttgactttagtttttggagttggtgagcttagtcacagcacattctggagttcatttaaaatatgtgagttctttttctttaaaaaaattgttactttttaccgtcataaaaataaaaaatgcttactgtgtaaggaatttatgcaatagagagagatggagaaaattaaaatatgcacacaccaaaactacattaccttgttaaccttttgtgactatccttccaatctgtgtgtgtgtgtgagagagagagaaggagggaggggaagagggaagagagaaaaggactatattatgattattgttctgtaacctgctttaaagttcatctgtttaataaatgtttattgaaaagccgttttgtgcaaggcactgttctagttgctggaagagtgaagaacaaacatacaaggcccctgttcacatggaactgtcctgtaaaatgtcttgaccgttttttgcatgtcaatatctgtatgatctctacatcatttgtaatagatgcatgatattttagtttaccaggtaccaagatttatttattattactgatggatgtttaggttgtttccaatttatctagattacaaagaacactgtgatgaatttatatgcatacatctttgagaaatgatctcatttatatttccgaaagaggaattattgggccagaagtggtgcacattttaaactttgatacatattggccccatggaaatgttatgtatattcacagtcctggtaacattgtatgatggccccattttgccttacaaacactaagtagcaggcatttcactgttttctgtttctattttcattcctttaaagttacattgagcacttttaaaatatgtttatatgctagttacatttagatgtaaattacatactcataatcctttgcctgtgctgcaatctgttgctgaattcatctttctgatataaaggttgttttctgtcacatgtagcattcttttccccagtctgttttttgtcttttaactttgtacatatatttgacatggagaaaagtgtgtgtgcatgtgtgttttaggtagataggtctttccgtttcttttacattttctaactctgttataatttttatatcttccttattcctccaaattattatatatgttagtctctgcttcctcttagtatttttttcttaattttttcacatattaccctgaattcacccagtattttacttcgttatatgagagctagagccctaattatagtttcttctaaatatttagagacttgtccagaattacttatcagatgattatttgattattccactgttttgaaatatttttattataaactaaattctgctttatacttgggtatgtttcaaagcttctattgccctttcttaacctattttagatggcagatgtttgtaggatttctgccaacaatgtcaaaggtaacattcagattagagacatttcaaattcaagagtcttattgttgagattgaagatttcctaaaaataactaaagagtatagccttggcaagttaaatagcctttatgggttaattttttttttttttttaatggtaagtgctagtgtggcttgataggttggggcctaaggtgaaattgtataaaagcctagacctgatggtagtgtttctcttctagcccttgggagccacgttgctgcgtgatgaagtgatctaagcagaaaccttgcttcatgctctcttccctatcccatccacctcatattattattatttccctgtgtacataaggtcctaatgtttatcatcaggctttatctttcgactggaggtgctaggctagtgtggaaataatttatgtgtccttaaatattagctaccctcaagtaaaacagaggtccttttttacctggaggtgtatatgtatatgtgtgtgtgtgtgtgtgtgtattctttctttgatacagggtcttgctctgttgcttaggctggagtgcaatggcacgatcttggctgactgcaaccaccgcatcccaggctgaaatgattctcctgcttcagcttcctaagtagctcccaagtagctgggactacaggcatgcctggctaatttttgtgctttttgtagagacagggttctgccatgtttcccaggctggtcttgaactcctggacttaagtgatctacctgtcttggctcccaaagtgctgggattacaggtgtgagccatcatgcctggccccctggagattttttaagttttttttaaagttaattctgctttctacaaacgtatttcctttattttgtttattgttatttttttgagacagtcctctctgttgcccaggctggaatgcagtggctcgatcacggcttcacatcccaggctcgagcaattctcccacctcagcctcccaagtagctgggactaccggtgcatgccatcacgcccagctaatttttgtcacccaggctggtctcaaactcctgggctcaagtgatccccccaccttggcctcctgaagttctgggattacgggcgtgagccactgcgcccaacccaaatatgctatctctaatgtacagcaacttcaatacctgatgcacagtttttgaatggaatttgcatactcattgtgtcaggataactgcgataaactacccgtcaaaaactggttatgtttttcatgtaaattttagcatttgggatattatttttagttagtacgatctttgccttaaattcatgaatacttggtgttccaagccttagtggaatgtaaattgagaacgtcttttttgggtttagtcctgccaatgcccttggactgtggtcaaacgttcatcagtcaggatcattgctacagggctactttcagggaaatgaataaggcagtccagcaattcagcccctttaacctgagcctgggaagatacggaattagactatagtgtgatagctttaaagaacaaagtgaggggcagtgtggggagggagagcatcaagaagaatagttaatagatactgggcttaatacctcggtgatgggatgacctgggcagcaaaccaccatggcacatgtttacctacgtaacaaacctgcacatcctgcacatgtacccctgaacttaaaagttgaagaaaagaaaaagagcaaagtggaaattgcaagattttagtattcagtgatggttctattgattcattatccctgcctttctctctgacattagttagttcagcacaccttcatatctatcctagatgttgaagctatgtctactcgctggtatctctagctgcagccttgtgccccctcgattttatatttcttattgtagcctttatccttctggattactaatcttggatcacagtagcttaaaatcttaccatgaatcctcattgcctccgggttacagttcaaactccttaatgagacaagcacagctctgtaggagctgaaccagcaacgttgtattactggcatttccccaaatgtacaatgtgctttctttggaattgtctttactttctttcttttttctttctcttccttctttccttccaaaaatcttgcttaattaactcctactcgttcaagtcattttagactttagttccttattgggttaggtgccccttatggcacccagccatctcctatttgttttctatggtggtggaatcttctacattctatagtgtagtaagcccattgtccagtgggcagagtttgtgttttcctatagagctaactcactattggttattttaccttctgtgagagaatttgtgttagcaaggttaagcttgcacaagaaggtgtgctttatattgcttatgaagcccattttgaagcaataccatttttgaaataagtgatacaggtagtaaattggtcatgatatactgattataaacaaacagtaatatagtcatgagtgataacaataacaaaggtcattagtcactggaaattgctggcatggactatgtgaagttagggacttgctgatatagcagtgaacctaattttacacgaaatactaacaagctttgtgacttggagcagggaagataaattcctagagtcagataaattggttcagcagaaccacacagcggaattataaaaacaacacattctggggttgttaagcaaggtgaacttttgcccttgtggaattcatattcttccttagaaacctagagtgaaattctctctttttttttttttgagacagagtctcattctgttgcccaggctggatggcagtggtgcgatctcggcttactgcaacctccgccttctgggtttgagtgattcttgtgcctcagcctcccaagcagctgagactacaagcacgtgccaccacaccccgctaatttttgtactttcagtagaggtggggtttcatgatgttggccagtctggtcttgaactcctggcctcaagtgattcccccatctcagcccagcaaagtgctgggattacaggcatgagccactgtacccagccgagtgaaattcttgtgcctcacttgtgaggagctgtattaaggttgctgcagaggctgcttcccgccatctgaaggggaaggagcccaccctccttgtttaacctttacctgtctccagtgggtttccctgcatcccaggcttccctcttgcaaaagccaaatttgaaaacagaactgtaaaagaagttatttaaaaatgagacagacagggcgtggtggctcacgcctgtaatcccagcactttgggaggccgaggcaggcagatcacctgaggtcaggagttcaagaccagcctgaccaacgtggcaaaaccccatctctactaaaaatacaaaaattagctgggtgtggtggcaggcgcctgtcatcccagctacttgggaggcagagacaggagaatcgcttgaacccaggaggtggggcttgcagtgagccaagattgtgccactgcactccagtgtgggtgacagagcaagactctgcctcagaaaaaaaagaaaaatgttcccaccttggctttttttcttttctttttgagatagggtctcgctctgttacccaggctggagtgcagtagtgcgatcatggctcaccacagccttgacctcccaggctcaagcagtcctcctacctcagcctcctgggtagctgggactacaggcacatgccaccacgcctggctgatttttgtgttttttgtagagacggggttccgccgtgttggctaggctggtctcgaactcctgagctcaaacaatctgcctgcctcggcctccacaggtgctgggattataggcctttccattcttcagtcacccagtctttctagacctgtggttgtcaagtttgactgcactatggagtcacatcaagggcttaaaaaaaagaaacaactgctgcctgggtctcacccctacagacatggttaaattggttcaggcatcagtattttcaaaactccataggtgacatggatgtgcagcctaggctgagaatgattgcccccaggctgtctgcccacagttgtgtccagcacctgccacctcttggcttcatttaattctccatttagcctagagcccacagttcatcacttcattatcttgcctcttgcctcacctcgtatcagtctgccctgttatcttgaatccatccaataattatagctgctcaactttgaaaatcctacagagggtaatcacacagccatgtggactaatactactacacattggtagtctcagggctcagctaaacctgcattgcggtgctgcctggcagtgcttttttttctgtgtttagctctgacatccatcacttaaaaaaacctcttctaaatcttcattctaccgcattcttggtagatgaccttagctcctacttcatactgtggatcccatcatgccttaaattagttttttctttttctctctttgcccttcggctagctcttcttgaatttttaaagaatttcaagtagtctttaaaaaattgaactagaggctgggcttggtggctcacacctgtaatcccagcactttgggaggccgaggcaggtggatcacctgaggtcaggagtttgagaccagcctggccaacatggggaaacaccatctctactaaaaatacaaaaaattagccgggtgtggtggtgctcgcctgtaatcccagctactccggaggctgaggcaggagaatcacttgaactcgggaggtggaggttacagtgagccaaggttgtgccattgctctccagcctgggcaacaagagcaaaactttgtcttggaggaaaaaaaattcaactagagagccaaggcggggaggatcgcctgaggccaggagttcaaaaccagcctgagcaatatagcaagaccccatcgccacagaaaaattttaaaaaattagccagaggcagtggtatgcagtgagctatgattgccactgcactccaacctgggtgacagagcaagattgtatctcaaaaaaaactagaaaaattaaactagaagccgtctgttccaccctttggccctttcactcactgtcaggtttcagtagaaactagtgtttgtttactgttatcacatttcaactcccattcatttactttttaaccgatttttagctgtctacccttatcctccatgaactgccccaattcttgccaaaagtgctcagagatagcagcaagtacatatgtaatctactggacattaccattcttaccttggtctctccagcagcattcagtgttattctttcttgaaccctttgagaaagaaaacagcctggccagataaacccttctgtcactttacttgcatcctggctgtctttctgcttctttgatccccacttttagtctccttcatgcattactctttttttttttttgagagggagtttcgatcttgtcatccaggctggagtgcagtggcacaatcttggctcactgcaacctctgcttcccaggttcaagcagttcttctgcctcagcctcccaagttgctgggattacaggcgcaccaccgtgcccggctaatttttgtatttttagtagagacggggtttcaccatattggttgggctggtctcgaactcctgacctcaggtgatccacccgcctcagcctcccaaagtgctgggattacaggcatgagccactgagcccggcctctccttcatgcattactgattcaataataatatattccttcttggccatcttctaagaatgctgtgcctcagagagcttgtgtatttaccttacggtggatggcttctgtatttttatctctaggctaaccttacctgctgagctctctgtatctgtttatttatttactcttcatttattcaaaattatttttaaaaattgagaacatactgtgtattattgctttgctgggctctggagaatttatattctactgtagtgtttctccagttgtagtttactgccagcctgcatcatttggtatgcttgtgaaaaatgcagattcctagtctcttcatctggtttattcacttgtgatctctacctgtgggcattatttatactacaagttgcaaacctctggtctcctagatgagatgtcaccacttgatgtcttgagagtaaattaaagttcgtatgttcaaaagttcattactctttcccatctctcattgtgcccagattttatgaatggcaccactagttaccatagcctgacccaggtatacccctcattatccctcattccccctccagcaataccatcatcagttattggctaaactccttgattctgagttctcaccttctcttgactttgcttccttcgcttgtttcttttgtgtgtgtgttttgttttgttttgttttgttttgagacagtctcgctgtgtcgcccaagctggagttcagtggtacggactcggctcaccacaacctctgcctcctgggttcaagtgattctcctgcctcagcctcccgactagctgggattacaggtgtgcgccaccatgcctggctaatttttgtatttttagtagagacggggtttcaccatgttggccaggctggtcttgaactcccaacctcaggtgatccacctgcctcagcctcccaaattggctgggattacaggcatgagccactgcacccagcctttcacttgtttcttatgcctttctggtttgtgtgcttgtctctttcttttggacctttgcaatatttttcccttgccttccatctcccctgcctgtactttattctcttaacttctataaatacaaaaatgatcctggttgcttccttttagtctttcatggttatttcttgcctagaggatgagctccaggccttttcagccttgtctgtgaagtcacgaagaatttatagcagagatgagtcttaaagcagtgctgctcaagcttgagtgtgcctgtgaatcacctagagatcttgttaaactgaagattgagtttcagtagttttgggggatgaggcctgaaattttgaagctctgaaaagctcccaggtgttgccaatgctgctggtccatgggccacacttggagtatgaaagtctggaaagaccgcctcctaggagtagttggatgcttccatctctcttctctcaaagtgttccaaacatactttgatgatagcctgtatcacactgcatttgcagagtcccgtacagactctacttctgaatgagaggtggcgtgtgcacatgtgagaaccacctctcctattaacacatggaaatgctgtaacgattagacacttacacacccagagcctgaaaatgtgaaaagaaaatctgcatattccagaaaccaagagggaatgcaaagcagtgggttggtctggtctgctaatttgaatcccggtggggttttaatttattgatatttcttctcattggtatattttcctgattctttgcatgcttggaaattttttaatagataccagacattttgaatttcaccgtgttgggtgctggatgtttttgtttttctggactgttgactccagctcttcaattcattttctttcttttttttttttttgagatggaatcttgctctgttgcccaggctggagtgcagtggtgcgatcttggctcactgcaacctccgcctcccggattcaagtgattctcctgcctcagcctcccgagtagctgggattacaggcacgtgaggccacacctggctaattattttttgtatttttagaagagatagggtttcaccatgttggccaggctggtctcgaactcctgacctcaaattatcctcccgccttggcctcccaaagtgctgggattacaggcatgagccaccgcacccagcctaccttattttctgtgtcataggaatcactgtcttcctttgcttgatgtccagtatcttcaaaactgttgtctcctgtatttttttctgattttttggttgtttcaggtgggagagagtaaatccagttagcgtttcttcatcttgtccaaaagttgaaggcttggggggtgggtggtgggaagagtagggcttttagtactagtgcgaggacagagtcagtgctgcacactagttataataacctcaaactgtaaacaacccaaacatccatcaacagaaagtaaataaagtgtggtatattagtaaaactatcctgtaacaagagtgaatacatgatagctaaatgtaacaacgcggatgattctcacaaacataacgcaacccaaagaggccagacaggaaagatacatcctatgggattccatttatataaaaatttaaagccagcaaaactagtctgaagtcaggacagtgagtacccttgaggggagcatagtacgtggaaggagacacgagaggacttctggggttctgctaatactgttttttgatctgggtactggttacatgagagtttcactttgagaaaattctttgagctgtgtacttacaggtgactttataatatgtacattatgtatcaataaaaagtaccccccacaccacttccccaacaaaaaggtcaaggctgcaagccagatgcattataggaaggtaagaactggattcccagtatagaacctagaaagcaagtcgtctgccctaggctgagggtagaaatggacacccatgagaaagcttgtgcaacgtgtaggaatcataggctcaagttcatactgtctaggaaatgcagaaaccctgatctgagacactaaaagaaaaactagttagaaaccagtaaaacttgtaagaccctgtccgagccacttataatactgccccactttaagggctccaccgtggaggccacttttgaaacactaggcaattgatcacagtgccctccctccctctctccctctctgtcacccaggctggagtgcagtggtgcgatctcggctcactgcaacctctgcctcccaggttcaagtcattcttgtgtctcagcttcccgagtagctggaattataggcgtgtgccaccacgcccagctaatttttctatttttagtagagatgggggttttgccatgttggccaggctggtcttgaactcctgacctcaagtgatccgcctgcctcatcttcccaaagtgctagaattataagcatgagccactgcaccagcccacaaggctacttctgaccttggaaactcttctttattttgaaaaaaaccactgggatttaaaaaatgtttttgaaaaaaaatcactgggatttaaaaaaatttttttgaaaaaaatcactgggattttagagctttttattctgtcatccacatctcaaactctttcatgatttctgtgtagaaatctgtagattggtttccaacacactggtcatggccaaaggcattgtttccacctgtggaacgattctccagagcaaagctttgttgacatctttaagagttttgtaaggagaagagcttctgggcatgtgcaacccaacttccccattaagccacagctccttcacagtagggaattcacctgttgcttgttgcattccagtgcatatgataatgactagtgtacattcggggctgtaaagatgttgtccagtaagtgactgcaaagcagtcatggagtaccactgtgtgctgagcctagtgctagaggtgttttgtttatttggtgacttaatggatattcttctattgttttgacaaacatttcaagtaatttgtaccacatggctttgttggttgcgttatgtaagtcaaaacagtattctgcaaggtaggatctcgtaccctagggggtacacaacaaactgacctgttgggttttggaaagaaaatattagagagagacagggacagaggggaggcacaaatacattttttaaaggccctgtgatatagtctggcttattttgagtagaaatttcagatatagtacttaacaattctctttatccataaacctagagagggctttgtggctgttgggagagtcagaatgaatctatgataaaatactgcattctcaacatgaaaagttcttcaaaggaggaggtgtatctaatgatatttaaagtaaaacatcttgggagaagggagaagtaggatctactctaaactttaccaaaatgtaatcgcctctagactattcagtacagcttagatgatcttcgttgctactgtttttgatctaaagccttgccacaggcactgagattattagtgggccagttctctctgctacttagccagcacttgacctgcatgttttggtagtttaatagcacttaaggatcacacagtgggaccaacagataaaaatcactgggattttagaccttcttattctgtcatccacatctcaaactttttcatgatttctgtgtctttacctgtccctctctctgggctgcattctggatagcttcttctaatctagatgccaattctttcgtaaattgtgagtacgtaagattctgtattacttgtcttttgagtttctgatgtcagtgattgtaactgtcattcctagaacttgtgtggttcttttcatattatttgtggtcatatataatgatttccctcatttccttctcttctcttgggttttgttcaggtacacagggaggttgcattcttggcccaaacccacgtggtgaggtgttctccaagaagacttttttcttttttgtttttgtttttgtgtgagatggagtctctctctgttgcccacgctgaagtgcagtggcgcgatctctgctcattgcagcctctgcctcccaggttcaagggattctcatgcctcagccttccaagtagctgggaccacaggtgcacaccaccatgcctggccatattttgtattttttagtagagacggagtttcaccatgttgaccaggctggtctcaaactcctgacctcaagtgatccacctgcctccacctttgaaagtgctgggattgcaggcatgagccactgtgcctggccaagacttttttcttttattctatttcactgaggactgaatccaagatagagagcatccgcatcttccctctatggaccaggatttttctgcttgcctttcagggagtccagatttacccaaggctctcagaacagttgtcctgtcattcttatctcaggcttctctccatctccaggtcaccagtagatggtcaggaggcaagcatggactctagcactcagtcactgaagaggtttttttctcatttctgaccttagagactcttctttattgtcctaacggttcaattatgtattttaaaacatgcttttactacacttgtattaaaaaggaagagagacaagtttatgaatatgtacatatataattcatatataccataaatgtgtgtatatattttgacttgtatatgcatttttaaaacctctggaaggacaagaaactagtaatgctggggaagcagtaatggaaacaggcagatggggggccagtggtgacagatttcttttatcagaccctcttaatatttttagtgatttgaaccatatcagtatattaccagttcaggggctgaacgtggtggctcatgcctgtaatcccagcactttgagaagccaaggcaggaggattctttgagcctaggagttcaagaccagcctgggcaatatagtgagaccccatctccataaaaaaataaaaaaattagcctggtgtggtggagtgtacctgttatcctagctactggggaggctaaggtggcaggatcgcttgagcctgggagatgcagataattacaccactgcatgccagcctgagcaacggagcaagaccctatctcatatgtgtatattcaacaggatatatatatatatatatatatatatatatatatatatatatatatatatattcaacaggatatatatatattcaacaggatacatatatatattcaacaggatacatatatatattcaacaggatatatatatatatatatatatatcctgttgaatcaattaattgtgtaatataaacttttttccccagcagtctagatgttctttacctggtgggtttcaggcatctagtctgctattttgttagaaatagaatagtgattacttttgtggttatatgcgttttagatcgtggttttacctgtctggtcctccagatgaactctgtagagcaatattttccaaactatctatggcaaagcagttgttctttaaaattatccaatctggctggctgtagtggttcacacctgtaatcccagcactttgggaagccgaggcgggcagatcacttaagatgaagagttcgagaccagcctggccaacatggtgaaaccctgtgtctactaaaaatacaaaaagttagctgggcatggtggtgcatgcctgtaatcccagctacttgggaggctgaggcaggggaatcatttgaacccgggaggcgaaggttgcagtagctgagatcgcaccactgcactccagcctgggtcgcagagcaaaactctgtcttaaaaaaataaaaaaaaaaaaattccaatctgccatgagccaatactttggtaaactacaataaaaataaattgctgatcacatgcttgatgtcatggcaatgttaaattgctatacaagtttctaaaaggtttcactcaattgtttctcacttgcaaaccagtaaaaagcaatgctggaccagaccacactttgagtagcactgcgatagatggtgctccagtattttctggtacttggtgtatcagaaattgataccaccctgttctttaaatttcttgttggttttaaagtttttccattgtaaacctggtgtgtgtgtgtgtgtgcgtgtgtgcacgtgtgtgtaaaactgtatggccttatctaaaacgttagatgtttgctacagcacacacctgccttagttagagaccaagcccatggctaagtggtctgggtggtggtaccggtgtccctccagaagtctttcccagtttaatagtggattttatcaaatcaagatgcattgatgcaagtattttttgatcatctagaagttctcattggttgattttcacagtaagtcagagctgccatctgcctggcagcaattgtaaggtaccattgatgtcagagatgttaaaatgtggaagaacatgtgtcttagaatatcttgcagatggacccatgatgttctagtgcctaattactgtcgaatgcttggagacttgtttatgagaagtacttgtcacatatttactagaagtaggaggaaggcttcagtggcttcctttagaaacttcaccactgtattgaatggcatcttgttgcaacagcctgatgttaactggggcacgttctgtcttctctagcattgcttctttcttttttttgagacggagtctcactctgtcacccaggctggagtgcagcggcacaatcttggctcactgcaacctccacccccgggttcaagtgattcttctgcctcagcctcccgagtagctgggattataggcacccaccaccacgcccagctaatttttttttttttttttttagtagagatggagtttcagtgtgttggccaggctggtctcgaactcctgacctcaagtgatccacccgcctcagcctcccaaagtgctgggattacacaggtgtgagccaccacacctgtgtggcattgcttctttcattaggagccctgctgtgctgcagcatccttgcaatggacaagcagtgagaacgttggccatttggtcacttatctatgaactggtggcactggtatatcttccagtgtcattaatagacatttttctcatcattgagtttttttcttactttcagtttccttctgttctacccctgccattctgaccttattaatattgggagttccagttgtcccattatcttgcttgccatgcagactgcttgacacttcttttaactgtgtattatcccactgcaaagaaatttctcagaaagttctggttatcctttcataattttctgctgcagacggtgttttattttacctgtttttatagttctgtggccacttcagtggcaatttaagaggaagaggagttaatctttgggctaacactgccattcatttcttcaccatgtattttattgaaatgcctgcgctatgcctggcatagttctgtgagtatagcaatagtcagagagtagtacatcatgggtattcaatcttttggcttcccttggtcgtattggaagaagaagaattgtcttgggtcacatataaaatacactaacaatagctgatgagctttaaaaaatcgcaaaaaatctcataatgttttaagaaagtttatgaatttgtgttggaccgcattcaaagccatgcttacctggttctacttcccttcatgtttagatcctcttttagaaagatgtcaagttttaaaaatcttaacttagaatttagggatttattgatagcttgtcagtgctttgatttgacactaatgtattctatagaaataatttttatatcatttgctttttagccgattacacctcaacaagaaggcaactgacaaacagccttatagcaagctcccaggtgtctctcttctgaaaccactgaaaggggtagatcctaacttaatcaacaacctggaaacattctttgaattggattatcccaaagtaagttcagtgttacggttttttgttttgttttgttttgttttgttcccctcatgataaacatttagggattttaacactgtataaggtgaaggtattaaaaattcatgatgatattggcctcataaaatataacctttagtagtagtcatcacagaacagaaataggttgaggaaggggtgtaaattccctttctaaccacctatatgtccgtgtgaagtagagatccctgagtaaaccttctgaaactcagacattgtcaagtgcctggtagtttgaaaataaaaattttcttccataagagctggatatgaacaataggaagaggagacaaggagagggagaaagcagtgttagtggtctgaaatgggttgcagtacagccagaactaaacgtgacttctccggagaaactggctttgagccaagaatagattacagttagtggtactgtagggtttcatcttacctcatttttaatttccttactgttctgattttaatagctaattgtattgcttataccatttatctatataatctgtatatctgtaaactcagtgtactcccttaattggagaccttccagttttcttgagatgaaagtattctttttatcactttgctttagtagtccacctgtagtttcttaggataacttaatattctttgatttttgtacttagctttacagcagctttgtattaaattgcttgagactgcttttgaaagggcattttggtggtaacagatcacttgtgagaagaatgtgtctttaagcttctacccacttgactttcagtacagtttagttttccctttgcggtctctattcacttgcctcaatttttaccctattgcctcagtttttccatagctgtttttgctactgggagagtcgtccctcttaatttttttggacagggtagctcaaataatcagaaggaagatgatatgcgcactacacttcttatggtgactggttttcatgctcttatttcttttcttttagcctttatttttctcggtagcaccaatgaaaagaatagagaagacacagatgtgatagccttaatgcagcacttattaagtaggtagacatgagtatcattcagttgtatttttagtgtttttatattattgctttggagttttggagtttagaagccaattttggagtattggaagctgttttgaagcaaaaaaattatatgttctagtttgtgtgtgtttatatgcttaataattttagatatttgaattaaatacatgtgttaacttcaatcaaatatataatttttaaataagatataattgtatatacttgttttttcaaactaaaaaatggtaaaacttagccttttgtaattgagaaagatataaataaaattaattgtaaaataagctttgcagtaagaaaaatgggagattttcaagctccataaaagtaaatgcaaaggagaattaatgtttacgaatgaaagaaattttctattgattatgaatgaatcttagagcatagcttagagtcatatgcattatcattgtgaaacttaatctcacatttcagttttttaaccatcctctttcactttccccattcaaccactcttaaaattggtcatggaatttttacgttgtagtgcttgtgagatgatagtcatggggtttaaatgcttgaggaagtcagtgaggggtttagttgtagaaagaatggttttttgtgttcgtttttgtttttaagacagtatcttgctttgtcacctaggctggagcatagtggcacagtcgtggctcactgcagcctcagcctcccaggctcaaccagtcctcccacctcaccctccctggtagctgggactatgggcatgtgctaccacacctggctgatttttgtattttttgtagagggtgttgccatgttgccggggctggtcttgaactcttgggctcaagcaatccccccacctcagcctcccaaagtgctgggattacagacatgagccaccatgccctactgaaagaattttaaaaagtaaccccagggttatatgtatccattgattacgagcatttctaatgaccccataactgatttcttgtgaatgaagattttggccaggcgtggtggcttgtgcttgtaatcctagcactttgggaggctgaggcgggaggattgcttgaggccaggtgttcaagaccagcctgggcaacacagtgagacccccaccttcaaaaaaataaaaattaaaaaattgaaataaaaaattgttttggaaattacagtttagaatgatctcaagagctcttgttttcacttagagtagtagctctttttccatttagttatatcatttaagtgggttgaggagaaagctattttgacattcattgtaagatgaagaatagcatctgcagattattttattctttgttagtacagaattttattttctaattataaacgtatatttagctgtataaatagaaagtttggaaagcagaggagaagtgcaaagtacctgcaatctaagggaaatatttgatttcacagcattttatttacttggtgaaaaccaaatacaatggcaaatgttccacaggagactaaagttaaaccactgaaatcacgcatatctgagcatgaacagacaaggcatttgtgtcaccaagaagtcaaggagacccaaaataaacatttacgtgactgccaggcgcagtgccctttcatatttgcattttgcctggtgtgaacatcgttttaccagagtatggaaatgttttcattttggacataactttctcttctaatattcgattgggactatcataggccatttgggggaaaataataaaacatatcttcaagttttaaaattttacttaattttggacatgtgcaagaaaatttactgctactggtacttgctctgaatttctaggtttcaattttggtgagactagactagttgctctgaaagatctctgcgctgtattcatcttacaagtctacttttatactgatactcattccttgggaagacataaaagaatgaaaaggtgatgcagttcattttccacagcattgaacactcatttgtcaccagcgtagaagggatttggggagagattaagcagtagcagtaatagtcaataatctgcgtctaaagtggcttgctggctttacttcagtaaattctggccatgtgaagaatacctaaatcaactatcagagttcttaacagtgaacctgtcataactatgatttttttttcttttttgcaattatagaattgattttttttttccttttgaggcagagtcttgctctgtcacctgtgctggagtacaatgccacaatctcggctcactgccacttccgcctcccgggttcaagcaattctcccgtgtcagcctcccgagaagttgggattacaggcgcatgccactaccgctggctaatttttatatttttagtagagagaggatttcatcatgttggccaggctggtcttgaactcctgacctcagttgattcccctgcctccgcctcttaaagtgctgggattgcaggtgtgagccaccgtgcctggcctgatttaacaattttaatacagggattcttagcaaataaaatatctcatcaaattgtgaagacacagagctgatagctgaaaaatgattcctggttaaaatctgatactttagaaaatacttggaatgctgcctccaatttggtgtaatttccaatatcaaaaacaaatgaatcttatgtatttgagtctgaacttttttttggataatatgaatatgagtctcatttacactctggctaatcagaaagtatttgtttttaattaaaaattatgtttaagcagtgtaatcaataaaaattaaaacttcaaggccgggggcggtggctcacgcctgtaatcccagcactttgggaggccgaggcgggcggatcacgaggtcaggagatcgagaccacggtgaaaccccgtctctactaaaaatacaaaaaaaaaattagctgggcgcagtggcgggtgcctgtagtcccagctactcgggaggctgaggcaggagaatggcgtgaacctggaaggcggagcttgcagtgagcggagatcgcgccacagcactcccgcctgggcgacagaacgagactccgtctcaaaaaaaaaaaacaaaaaacaaaaaaacaaaaaaaaacacttcaaaccttgcatctgaataaaggcagactgtacctcccttacttataacctccctacttaacactagtatagcatttttcttcccattgagtatatttctagtactatatttttacaaagttttctcttgctggggaaaataaaagctaagattagttttttattgtactttatggaattgcattacttataaacatttcctttcatcatatgtactcatactcacaaaatagcattaaaaaagcattaaaggctgggcatagtggctcatgcctgtaataccagtactttggaaggctgaggtgggcagatcacttgagcccaagcattcaagaccagctcgtcgtctgtactaaaaatacaaaaattagccaggtgtggtggtgcacacctatagtcccagctactcgggaggctgaggtgggaggattgcttgagcctgggaagttgaggctatagtgagccaagatcacgccactgcactccagcctgggtgacagtgaaagaccctgtctcaaaaaaaaccattaaagatactatgctggctgggcacagtggctcacacctgtaatcccagcactctgggaggccgaggcaggcagatcacgaggtcaggagattgagaccatcctggctagcacagtgaaactccgtctctactaaagaaaaatacaaaaaattagccgggcgtggtggcggatgcctgtagtcccagctactcgggaggctgaggcaggagaatggcgtgaaccctggaggccaagcttgcagtgagctgagatagcgccactgcactccagcctgggtgacagagcgagactccatctcaaaaaaaaaaaaaaaaaagaaactatgctatgtttggaaaaacaaggaactctttagagcaagcctggctgagcagcctcctatagtaggaaagctcgttgttacttttgccgtttgaaaagtcacttaacctctctaatcattattgtgaaggtcattgcctttttggtggctcagccaaatattgttttgagagtctggatgggaggctgactgacactttctgtgacttagagtcagctcttaaggaaatctcaggagggtggtagaagtagggccctttccattttcagatttttatctggtctctggagaccaggtaactgtcaagttggtttcagtacctcttgagtggcaattttcgtcagtcatcattagaggtagatattggatagaatatataataacagcagtatgtaggtagaaagtatgaggaaaatatacattgttttcctcatcgacttaattattaagaaaacatgtttttcatttgacaaaaaatcttattagctaaccttcttcattaaccttagtcttggttcttttgtgatcaactgcaaatttcttttatttttattttccccgagacggagtttcactcttgttgcccaggctggagtacagtggcgcaatctcggctcactgcgacctccctctgcctcccaggttcaggcgattctcctgcctcagcttcccaagtagctgtgattacaggtgtgtgccaccatgcctgctaattattgcatttttagtagagacggggtttcaccatgttggtcaggctggcctcgaactcctgacctcaggtgatccacctgccctggcctccaaagtgctgggattacaggcttgagccaccacgcctggcccacaaatttttttattggcagtttttgctgagattataggtagtgggcaaacaattgttattatgctcacaggcactataaacattttatttctactttttacttgtgtatgcttatcattggaagtaaatataacagactttgtcgttctcttgagttagttagctttgttatgttttcatggacataattaacctcccttctgtgcttaaaaatgttcgaccagttttatgttgtcgtcgttttgttttttttttgagatggagtctcgctctgtcgcccaggctggagtgcagtggcgtgatctgggctcacttcagtctccgcctcctgggttcaagtgattctcctgcctcagcctcccaagtagctgggattataggcgcgtgccactacacttggctaatttttcgtatttttaggagaaacagggtttcaccatgtttcccaggctggtctcaaaaacttgacctgaagtgatccaccagccttggcttcctgaggtgctgggattacaggcatgagccaccgtgcctggctgttcaaccagttttagaaaagatttggtaggaaatttcttcattgagtcaacatgaatttattaccacttctggggaaaaaaatcactacttagaatacatatcctacaaataatagagtagtatttttgtatgttaaggacaaatacttaaaaaatttagttgttgactgagcatggtggtttgnnnnnnnnnnnnnnnnnnnngcaagcagatcccaaggtcacgagtttgagaccagcccggccaatgaaactccgtctctactaaaaatacaaaaattagccagacatggtggcgggcatctgtagtcccagctactcctgtttgggaggctgaggcaggcgaatcgattgaacctgggaggcggaggttgcagtgagctgagatcatgccactgcactccaacctgggtgacagtgagactctgtctcaaaaaaaaaaaaaaagttgggttgttaatggaaatttaggggttcagttcaggattttataaatctggctgcatgtcagatcaccccagagattctgactcaaaagtctaaaatagggtccaattctctttttaaaataaatgccccagggtgattttttttttttttttttttttttttgaggcagggtctcactctgtttcccaggctgaaatgtagtggcgcagtcttcggctcactgcagcctcaacctcctgggctcaagcaatcctcccacctcagcctcccaagtagctgggaccacaggcatgcctcaccatgcccagctaattttaaaaattttttgtagagacagggcctcgcctttttgcccaggctcctctcgagcacctaggctctagcagtcttcccaccttgacctcccaaagtgctgggattacaggcatgagccaccgtgcccagccccagggtaattttgtcacagctgggcaagtgttaagaaatgcctttcttaatttactgttaaaaatctaaacatagcactgggcaaaataaagttgtaggtattttcatagttacaaggctaagcatgcatttcaagatcgtaaatgtccattcaaatcaaattctgttttgtttcaaaaagttatgaaacaaaaaagggtaatcttactttgtccttttcatgtgatgaatttggaagggccctttaaatttattataatgggattttatatgaaatttgttgcaccttcatgaaataatattaagtatagagacaaagcttctagagagaggttgtgtttattttgcttccttttgatgtcactttttactctgctaggcaccctgtgagcagttagtaaatcttcagtagtgatggccatggacaagcttgagatccagttaatggagattaactaggagattcctatctgggaatggcaagactgcagttgtgggcactgccagtctcttccttatttattctgcttgcagataggctcctaattagaagcttcactccattaaagcaacacttgttatcataagtgtttgcatccattgtgaatgctctcttttaaaactttgcataatacagttgcttgttttttcctgtgctttttgttcaatcaatacatgctagtaagtgcttatttttttaaagaatttaatttacatacaatgctttttgactagtatgaagtgctcctttgtgtacaagatcatgatgatccagccattgatgtatgtaagaagcttcttggaaaatatccaaatgttgatgctagattgtttataggtaagtaacaaattctgtagtaaccattttccattgatagtattaagtatcagtaatctctgcattgaactgaagattaaggtgttagccatgtttgttttaaacatgtttgttggagtactgagaggtgtttacgtccttttgagaaaagttataaaaacaaaggtttttttttttcatatctgagatgaacaaaatcacacacaaaataatatttttcccattaatcagacatgagggtctgttattttttgtttcttcaatattttaaatgtgtggccttttctgtatcttactgactataattggagtgaatgatagaattcacttttattacattacaagaagggtatttttccaaaagcctacaggcttatttgaaagacttgtagaggtgtgtttgccattagtgtttttttttttttaacatagagctgatgtggtctctctaaaaaacaagtaagtcgtataaaatgatatcagatctttgctatttgaagatcgggcaatgatttaaattttttattagcttaaaatgcaaatttgaaaattaatataagtgtagcatgcctacgaattaatcaggaccattacaaatctatcagctcatggtcagagatgctcattcttcacatgtgctatcttaaattatttactgtcatatatttatggggtttttttggttttttttttctttgatacgaattttttgctcttatcacccgggctggagtgcaatggcacaatttcagctcagtgcaaccccttccacctgggttcaagcaattctcctgcttcagcctcctgagcagctgggatcacaggcgtgcatcaccacgcccagctaatttttttgtatttttagcagagacagggtttcaccacgtcaggctggtctcgaactgctgacctcaggtgatccacctgcctcggcctcccaaagtgctgggattatagcctccccagtagctgggattacagtcaggcaccaccacgctcagctaatttttttgtatttttaatagagatggggtttcgccatgtcatactggtctcgaagtcctgacctcaggtgatccacccccctcgacctcccaaagtgctgggattacaggcgtgagcccatggtgcctggccatgtgtgtttacatttaataaacctttattaaatataatctcactgtatttatgaatttatactgttttaattatagcttcaaaataacgcctgtagctttttcccttaggattattttttaaattgacaaataaaatttgtatatatttttggtgtacagcacgatgttttgaaatatatatatatgtacacattgtggaatagctaaattaagttaattaacatatgcattaccacacatatttattcatggtgggaaatctctcttagcagttttcaagtaaacaacatgttgttatatactttctcatgtacttatactttatttgtggtgagaaatctactcttagtcattttcaagtataccatacattgttgttacctatagttgccatgttgtacaattgccattaaatattgactcatacttaactactaaggcaaggacttaagaattagaaaaagtgaaacagtgaattttcaaagataaatgatacagttttccttttgagaatggacagttttttcctaaatatattattatgaataatagagaatgttaaataatatgaaagtatgtttaattattaaatatgcaagtattctcatttctatcatgtatctttatactataaaatatttttaatgttgcataaatcttttactactgtacctttacatttttaggtggcaaaaaagttggcattaatcctaaaattaataatttaatgccaggatatgaagttgcaaagtatgatcttatatggatttgtgatagtggaataagaggtgaggtttttttcttatttattttataaaactattaatttgaagataaaatgctaaaagcaatctcagatacattcatgagttctttttatttgcctaaaagagtaatttatttcatcatcatttcatggtaatatgtccagttatgcttactaagattttgatttttttaatcctaaactagaatgttacatgtattaaaatgttttcattttgaagagaaaatttcaaccattaaattaaaaatggttgtggttcattatataatctgcaagctttcccatgggtgtaacttttcccttgtttgcctgacacttatctttaatgtgtttcggcttgcgtaatacaccgtctcacaaagggacagaaattaataggtgcatattttactaaaacacatacacttatcggactatacacatgactttttacttaaatgattttagcaagaagcctttcatatactgaaattataacttgcattttcgaacactcataatagtttcagtgttctataatattttcttatattctaattgccttaagcttctcaaccccaatactgttcacattttaggctttgttgtgggagctgtcttgtaggatgtttagcagcatgcctggtctctaccatgagatgccagtagtacccccttctcagtagtaaaagcaaaaatatcttcagatgttgccggatgtcccctgtggggcagaattgcccccagttgagaagcactgacctagaatgagtatttaaggtccaaatacaacttttctttatacggtagatttagttcttaaagacttggaggaaatgaaaaataaggtcatgtaaaaatgatatgagatgtttgctaaagattgggcaataatttaaattttttattagcttaaaatgcaaattagaaaatgaacataaatgttgcactcctatgagttaatcaggaccattacagatctatcagctggtcagagatgatgttcattcttcatatttgctatcttaaattatttactatcatatgtttttcagtgtacagatctctgttcaatataatcacgttccattcctgtgtggaaatctgatactcacagagaaaatagtctcatttcctatggttggagagtagagaagccagcacgagaactgaggtcctttagcctctgctcctgagccttttccactaggacagattgtccttattccaaattagaagttccaacagggggtaactttttcaaagtatattctgcctctggtacatagtaggtatatactgggctaaaaaatgtataaattagctttcgagaattaggcccttttgaaattttgtattctcctcagaaaggtggttgagattcattttattagatccatatgtttaaaataatgtattttattaagaatgtaataacaattcacaaaatatattttatattaatgggcattctactaaaaacaaattttcttttctccccctctctgccttttttttaaattgtagtaattccagatacgcttactgacatggtgaatcaaatgacagaaaaagtaggcttggttcacgggctgccttacgtagcagacagacagggctttgctgccaccttagagcaggtgagtatggtggttataaatcatgttcatagtatcagacccctcatttcccagaagcttgagactatgggagctggaattaggtatctcaagttaactgtattaagtccatttgggaacctgctgtgttctagaagccctgagttgagagcagctgttttcattagtgaggaaattcttgggaccctgactgtaccctggcagtgaacagctgtgcgcaggaaatgcctgcggtcttattgccagctgaacacagtctaacctcttgccttgtagtattcacttcctgttctagagttcagttctttatattgttctttcaaacattcgatctgaaaagaaccgctggccccctccccccagcctttttttttttttttttttttttttttttgcgacagagccttgctctgttgcccaggctggagtgcagtggcacgatctcggctcactgcaacctccacttcccaggttcaaacgattcttctgcctcagcctcccaagtagctgggatttcaggtgtgctaccacacctggctaacttttgtatttttagtagaaatggggtttcaccgtgttggccaggccggcctcaaactcctgacctcaagtgatctgcctgcctcagcctcccaaagtgctgggattacgggcatgagccactgcgcccagccctcaaaagaacctttttaaaataccacaaagtatttcaaatatacacaaaagaaaatgtattcatacaagtccttataaaacctatttgatgtccttttaaaacatatttctaataattacctgagaaacttatgttttcattttattttttctccaacttagaaatagtaacatccataggaaactataaataatggaaaagtataagatgcaaaaaaacaaaaaccaacaacctagaaccctaacaattacaggaagtttatggggtttttttgttttttttgttttgttttttttttagatggagtctcgctctgtcgcccaggctggagtgcagtggcgcgatctcggctcactgcaagctccgcctcccgggttcacgccattctcctgcctcagcctcctgagtagctgggactacaggtgcccgccaccatgcctggctaattttttgtatttttgatagagacaggttttcaccgtgttagccaggatggtctcgatctcctgacctcgtgatccaccctcctcggcctcccaaagtgctgggattacaggcgtgagccaccacgcccggcaggaagtttctggttttaaaaataaacattgtatcatttggacactttggagtctttatttcccccaccacccccttctgggccctttagaaaacattgttgagatagtattctaaaaataatctgtatcttatttttgtgactttgtaagcttttcccatatcattaatagcttttcataaaagtaatttttattggctgtatcataggccatcgtatgtgtgtcctatgcttgagttaatcattcctgtactgttaaacatttgggaggaaaaatttgttgtaatgttataaggacagatatgtgatttcagtctttaaatatgtcaacttgctcttaagcatatctgcatttatattcttttgaattgcagtcttatgatcgccacatatctgaaggggtaaaggtacattgtgggaacttgcatctggcctttggcagtttgaaccatgagctctttcttaatattgcctgtaaatatatttgtcctactgcaagaaattgttagtcttaaataccagaatttttgtttagaaaaagaaactgagtagccactttaaaataaaatacaatgtgttctagtataccaaattgtatttttgtcttagaaatatccaaattgatacagatgtcaataacatctctgtgatgtgtatgtcaataaacatctcccagaatacacccattgccttagtgtaggtttaatctctggaagtcactctgccatacttagagttaatcattctcaactgtaaagagcacattcagctcagtgactaacatctcattcctaagacctcaataactactaaggaattaagatatgtgcctctgttcttagaagtcaggttcagttcagtcccacaaacactagggcttcactggagtctgggttcagggtaggtagcaagaatcataatcataattgccccttagaattctcttgctctgcactgtgtgtgtaactcctaagaaagatgactactctttatttcaggctaattagaaaaggcaacatatctgaggtgtaaataataaataggattttatgtctactaagtagggtaataacagtccttttctaccattgatttatcagcgtatatatcttatgacttcagagtatatgcagagaaatggcagtagcggatgagagaattttagtatccccgttatgaaaaatacattgaaaaaaatggagaaattgggaagaatcttagtgactaagggagagggagcagctagctacaaaaggatgcaagaaaaggaattaagaaataggattgtgtcccctccccaccccccaccccccaaaaaaataggattgtcccgaaggttgatatacctatgggtggtgtgtgtatgcatgcatgtatatatacacacatatacgtaacatacaaatatgtatattgatcccagtaaagtagatgtgtgtgtatatttacatgaacaccctaaaaacaagatacattgaatatttgttaatattttatatatcaatgagtgatatttttaccttattttgtatctaaattaagttttatttggatgcatttttagcttactaactgtgcttgctctatgaaagcaatattgtctaccactttttattcaggtagtctacgtaagaataataagatattcactcaatcatacttataaaaaaaccattgggaaaaacagttcgtgaacaccatgcttttaacatgaaattctaatcatacacgtttgtggttttttgggcaggtatattttggaacttcacatccaagatactatatctctgccaatgtaactggtttcaaatgtgtgacaggaatgtcttgtttaatgagaaaagatgtgttggatcaagcaggaggacttatagcttttgctcagtacattgccgaagattactttatggccaaagcgatagctgaccggtaagacaactaaatgaagccatagtatttttattacctaacttctgttggtttattctttttgttcaacctatagattagggctttttaatttaattttattttttttgctagtaagtacagaataggtcaataattttattattttgtttgtttttgagacagagtcttgctctgtcacctaggctggagtgcagtggcgcgatcttggctcactgtagcctctgcctcccgggttcaggtgattctcatgcctcagccaccagagcacctgggactacaggcatgtaccaccatgcacactaatttttgtatttttagtagagatggggtttcttcatgttggccaggctggtcttgaactcctgaactcaagtgatctgcccacctcggcctcctaaagtgctgggattacaggtatgagccaccacacccagcagatcaataattttatagagtaattcatattctaattatagaattgtagatatgtactaatgaagaaggtaaatgttctgattcctctacatttttcaaattaatgtgttttaaagcgattaaaagtaagtttctctgtgtttagaatttttactatatagatacaaatttctgtgttttagaagaattaaaactatcagtgcagtcataaactagtaggtgaaaatttaaagactatcatttcaaaatttgaaatttgtcagtgaattatatgatactttgctaagaagccactgaaagattcatatgactgacttagcatttctctatcacaaaatacttgttttgttttggtttttttttttttttttgagacagtctcgccctgacatccaggctggagtgcagtggcgcaatctcggctcactgcagtctccgcctcctgggttcaaacgattctcctgcctcagcctcccaagtagctgggattataggcacccgccgccacactcagctacttttttttgtatgttagtagaggcggggtttcaccatgttggccaggctagtcttgaactcctgacctcgtgatccgcccgcctcagcctcccaaagtgctgggattacaggcatgagccactgcatccagcctaaaatacttgtttttaaaggagatcactgccttgtgtgagaattcttttaaattttttaaaaactgaagtgtgttttaaatacaaattctgtcatgattgtgttcatgtggttcatggtttcctagtgtctcccatgagatccataatgccactttctgtttacatgtcttgttgtttggttagtagtcatcagagactaatctattaaatatggagccctctccattttttttcaaaatgactgcattttaagtttcttaaattgtaaagtaaggtgggtacagtttcttctagttcttagatggtgctgtcacgggccagcataattgctaaaacatccatacgtatggtagaccttaagtcatgtgctaatcatgaaagctgggctcaccctgaataccggcagttgcctggtctttataatgattactgaatgcataaccagttacgcttgcatgtgttcatcatcataacttattttctaattatcttaattttcagaggttggaggtttgcaatgtccactcaagttgcaatgcaaaactctggctcatattcaatttctcagtttcaatccagaatgatcaggtaaatcaactgttttctttttatacttcgttaaaaggaaagtggggaggggggtggtaatttttacaggtttaatgtagttaaatgaatgtacctaaaggttgaagatttttgtttagttgcagaaaatagagtttaacgtctgtgtttaagataaatttaatgtctaaatgtattttatttgctgtataacactgaaagcactcattagagaaatgttgagactgaattttttaatatgctgatctttattttctaactttctgtgctgattaaattttattatctgtattcatcagagcgtaggccatacaaatgaatttaaagacatttttctttgacatcctagacaaaaatagaaaagagagtcattaaaaaaaatttttaggttgtgtgtggtggctcacacctgtaatcccagcgctttgggaggccaaggcgagaggactgcttgagcccaggagtttgagaccagcctgggcaaaatggtgaaaccctgtctctacaaaaaatgcaaaaattagccaggtgtggtggcgtgtacacctgtggtcccagctacttggtgggatgaggtgggaagatcgcttgagcctgggagattgaagctacagtgagtgccactgcactccagcctgggtgacagagcagaaccccgtctcaagtaaaaaaaaaaaaacaaaacaaaaaaagtttaaagagaatggtctttctatcacagggtaaaaaaattgattatttgagggaaaaaaaaaaggatttgtcttgtagccaggatattgttttaaagaaaatcctttttgtttttccaggtggaccaaactacgaattaacatgcttcctgctacaataatttgtgagccaatttcagaatgctttgttgccagtttaattattggatgggcagcccaccatgtgttcagatgggatattatggtatttttcatgtgtcattgcctggcatggtttatatttgactacattcaactcaggggtgtccaggtatgtggataggcatgaaaaggttggcagtcccttggtggaactagaactatttcaatttagaaaaagttgaaggaaatgtatctgagccattcttcagcttcccattgtaggttagtctcgggtttgaacatgactttctctagtggaatgttgatgcaaaacttaagtcgatttgcaactttctattggttatataatcgcttttattaagtttccaaaaacatgaagttaattaaatcagtgagtattgaaactaataagacattaagatagcagttattttaatgcttcattaacaattagcattttcttgaacggtataacatggcagttaaattacataaggaagcagacttgattttacatagtatacttagaaaagtgaaatccaagaatttaattttttaaccttgtctttagtttgacagtgagtgaaattaaaaaatttttttttccattcctagggtggcacactgtgtttttcaaaacttgattatgcagtcgcctggttcatccgcgaatccatgacaatatacatttttttgtctgcattatgggacccaactataagctggagaactggtcgctacagattacgctgtgggggtacagcagaggaaatcctagatgtataactacagctttgtgactgtatataaaggaaaaaagagaagtattataaattatgtttatataaatgcttttaaaaatctaccttctgtagttttatcacatgtatgttttggtatctgttctttaatttatttttgcatggcacttgcatctgtgaaaaaaaaaaaaaacacatctgtagtcttggccaaatgatacactttattttgtggaagtagagaatcaagagaattggttctaggaacctgggttcgttcatcattgttgtttatttttttaaaataaataaataaatatatatatagatgctctgcaacaaactctgtgacagtatccttcagtagagaaagtttcttacttgtgagtacactcttttagaacatttacgggtggcagcagctttgctttagagtttagaagataatagaaggaatgactattcatgtccaaagtgaatggttttgtgcagtgaacaacacatggcgaggtactaactgagaaactttttcatgctttatgcctacctcttgtagttgttgcagagcaaatataaattgtaataagatagctaggccttgcagaaacaaacagaaaaacttaaaaaaaaatgatataagagctggagtctagtatttatatgaatctgtgagagataatttttttggtctcactgcaatgaaccaaaagcggctgagtttggtttttaattgtagccatgtattgaaggcatctttttgaccaactcttgttggttctgtcttgaaccattgttaatcactgtgctgtaattagtatagctaaatcttttccttccttgctcctcccccagcccaccccgtcttcccttaacattttttcagggggggttgggagtggtttcattttagtgtgagtggatgttttgatagttgtaaggaaaaaatgcatttcagacacatttcacacatgagctattttcttacacagtatgtcttattgttaataagaatgtaatttcatgatacaagtatttaataccttttttaagtcagtaaatattctagccatcaataaattgcagtagagtattaagaggggacaggatgagtttactcttaaaattaatcagtatcaaactaagtctactgtgtgtgttttttttttttgttttttgtttttgtttgtttactattatagtaagtctagtcttatttaaattggatttttgtattccagtttatatgacaaaatagactagatcagcgctggttgtaaatgcatgctgtacctcactgttttctccccatcatgccgctaaacttgctcgccaggttgtgcttaacttgtggtgaactggacttgattctgttttgttttgtttttttaaaaaaaaaaaacaaaaatgtaagggacagtgcataagccttttctttgttaagtagtggtgttttgctttttcttcaggattggatggcatgttgtccacaggaatgcctactgcagggctaacactggcaatatggcagctttaaattctgagttactacagtctccatgtcaaagcataatgtgtagcatatcagcaataactacatatttatagaaaacactttttcactttactgagccaattcatttaattgtcaaatgtctatatccatggtttaaatggcaacatatctataagtatgtatacacattatatttaagcttttctctgggccaaactgcttcatccttttttctttctttttttttttttttagccttatgatgaatttgtttgaagggcattttctttatgaacaaaggcttggatgcatattcctttctttctgtgaatgggtattattccctgaggaaagttgcacagtgaaaaccagtctggttgtgacccactacatgttttgtttttaatcactattacctgagttgaactttgctcaccatgtttgtacttgttggtctgtttaatgaagtttggttgatgccatcctttgcactgccgaagcgtaatcttgtgtattacttagctctctgctgatctcagtatggacagtgtaacaacaaaaccaaaatggctggacagacttcttgtgttttgtaaatataaactaggacagttctgtaggtttgttcagtgtgctagtggagtatttccttaatgtaaaacttcacttaacagagagattctttgtttagcaagcttggagtgatgataaaatggtaagaaataatataaatgttgaagaaagcatcacaacagaactataggagtctaaatttaataaatctttaaaaaaaaccagtgtctagaatatataccatgttttattatttaaaatcattgtcttaaatttttgttcaaaaaataaaaatttgaatacaatcaaaacgttagcaatagtgtattttttgttcttctgtatttttataagtagcatgttccaccattcacatcagaattattagaagagttctgtcaagtattccttttgaaatcttccttttacctgagccataggtaaaataaataaggacataggcagtcctgtgacttaagtatggcttttctacattggttgcctgttaaaatcacctggagaacttgtaaaaaaaaaaaaaaatacacaacacacaccctgggccctgtacacaacacacacacacaccctgggccctgtacacaacacacacacacaccctgggccctgcccacatagattttggtgtaattattttgggtgaggcctgagctcttctacccgtgattctactgtgagaatgactggctcgtaatgacctttagaaaagagccagtggtcctttgggcccctctccccccgggctcacagcttgaactcagccttttagatcttaccactctaatggctagaaaatgtaaatccaaaggaaggaatggagtggcattattacttgagacccagatgggagatgcaccttacatactttccaaggccaggtccctcccaagctggaagcctttacaggcctgttttaccaccatcccatgagaaaagaatgttcttaactggagaacaaatccggggtagaaagaatccgctctcagctgatatttttgtctctccgtagttcctgtgttgaaacctaatccccaatgtgaggagggtctttcaaggtgaggcctttggtaggtgatcagagccgtcaggatgggattgatgcttataaaggaaaccccagagagctttcttgcctcttccgccatgtgaggatacggcaaaaaggtgaccagctatgaaccagaaagtcagcttttactagccactaaatctgccagggccttgatcttaaacattccagcctccaaaactgagaaagttttgttgtttataacccacccagtctatggtattctgttatcggagccgtaagacacagtctaaaagggatctggcccagtaaacaaacattccttctcatttgtgtacttctaaccctacagtttaagaaatgatcaacacaaagttgagtatgtcttagaatttcatagctaggtggatcttgaggatccctcacccttattttagaatgaagaagctgagacacccacggtgagagctgtgatcatagggttaggtaggcatggtgctggtggcagagctgggagtagcccctctatctggtcccagtgtggtatatttctccgctggaccacatttaaatttatgcttacactggcttgaaaatttacctagaccttaagggggaaaaatatcacagttttaataaccatctgtatcctaactcaaaaattgttctagagaaccagattcaaacctgtagaacaagaatgtaaattactataaagctcatttaaagtgaaatgctttacatacatgattgataagattgatgcataccacaagactgtgttcatgagaatggaaatagttcagacctttccttctgaagtttatcaggatctagtgcttgagttatttatttattcatttcaagttatagtttacgaccatatcaagttcatttcggtgaaaagaaagcaaaccgcaaaatggtgagtacctgtctctgcagagctgcaaggatatgtgtttagttgggtaatttgctttaaaaatattgatacctagaaaaaagtttaaaatcactatcctagtattttctaaaaacaaaaatacatatctttaagagatccctaagcagctagtttcctaagaaccaaaatgtgctaagcctttcacatggcccctcctcagttccgagagaaattggcagagactgtgggtgtctggaatggtttcatgtggttgtgctgtttagactaatcatcattaagacatccatgctaatagcatggacttgtaattatctaatttaagcaatttagggatatcatttattcttctacaggactgagagtatctgcacccctcctctgctgcctgcacaccccattgcggtcatgccacctttgtttcccaacccttgtcaccagatgtgaaacctctatcatttcccctcatgactgacggacaccaggccagcctaaggaacatgctggagaaatccagcagactatttattgtgcagctctggagcaggggaaaggaatgggttagaagtggtgacttgggagtaatttccctagaggtgatggctgagacagtgactataactaaagtcaaagtgccatttagagagacaatggaagaaaaacatctaggaaaagaggctgccaaacctggggtccaaatgggctttttggtagctatgggactttaggaagcttccttcatctttctgagccaagctttcttaaccatgtagaatggagatactaaagcacctgaggtggtagagatgattcgatgaggtcatgtacatgagcatagggacagttagtgcctttttcctcccaaagaagaaagaaatagtaaaaggagtgccacagtagccttggaaagagagatttcaagaaggaagtggtcacgggaggggccgttgaccgtaaaggatgagaagaggctggtgaactctggggcaggaaactccctgtagagttgccagcgtgggtctccgccatagtgaattgtctcagacgttgatagatgaagtgtctgcgtgggagtaatacagcttctttatgaacgatttttcttgttttacacagtgatatattttctacagtgagagacaaaggggtgggactttcaaagacagaaattgctcctgaccctgagagcacccatatgactctgatgccaaggaaacagtttaagaaaggcagctcccaggaagccagttcatcagagtggaagaagcagaagtcagatgctttaggtttggctgcgtgtgaaaaagacatgaaagcgatgggcacagatatttggaaactgcaacaacgatgcatttccacccaaggtcccagtaatactaagccaaaaaactaagcctgacttgaatttgtgagaaatgtcctaagaagttgggtcattaagagacgatgaaggggaattgtccatccccatcttccagtctcctgactttatcctagactgtctcccaacagcataatcggcatcccggaagcagctgtgggcaccctagccctgcccacagtctgccctttttcattttgttctgattcgcttatttttggttatattgcttgttttacttcctgctttgtctctacattgacttggagcttgacttctgacttcagcttcttcctctgaccccatgttcctcagccttactccaagcccaggaaaaggtggtccttaattttctattctcatttcacatcaccatctctccagcctgagctctccacccccaacccaatggctcactctcaccagccgacccttttccgtgtggaaccagagcttccttgctcccatgctgtttccttgccctgaaagtttctctcccttcatcctcactttccctgtctatggggatactctccttctttattgttggtttttttgttttattgttttttgagacagagtgtcactctgtcacccacctggagtgcagtggcgcaatctctgctcactgcagcctccacctcctgtgttcaagcgattcttgtgcctccgactcctgagtagctgggattacaggcgtgcaccactacatccagctaatttttgtatttttaaggggtttcaccatgttagccaggctggtctcaaactcctgtcctcaagtgattcgcttgcctcggcctcccaaagtgctgggattacaggcgtgaaccaccgcacctggtcaacatactctcctttaaacctcaactcacattcaattcaggacctttccagagttgtgtgtgcccacattttgtccctttcattttgtcaggcatttcacttacgtgtctgcaggtcatttccagttttcaggggcctggactttgcatatcttagtagtccttttttgtgcttttttctctttgtacccttccctccagtgcattcatgtaatagtcactcgggaaaggtctattgttgacagtcaagccagaatcaaaacattaattctggcacatatgtcatttaatacctttccaccctctcattgtgttagtaaggtgtttgctatttcatgctcccaacccccccaccctcaccctactaaaacaaaagatttctctacacatgagtaaaatactaaaattttattttccccttctagaatcttctagttctggttttgggtttttgttgttgtttttgtttgctttttgttttttgagacagaacctgcctctgtcgcccaggctggagtgcagtgatgtgatcttggctcactgcaacctccgcctaccgggttcaagcgattctcctgcctcagcctcctgagtagctgggattacaggtgcacatcaccacgcttggctaatttttgtatttttagtagagacggggatcaccatgttggtcaggctggtctcgaactcgtgatcttgtgatccgccctcctcggcctcccaaagtgctgggattacaggcctaagcccctgcgcccggcctgtttttttccttaaactttgagaagctagcagtttttggaaggaatcaagaggtgaccctgtcaagtctatcttatcaacatcctacaagcccattgattcttgttgtgttttattttctttaagttacacattggttttggatcataaaaatagtacatatttactataaacctgaaacataagaaatgaacaaaagcccttctaggtagatactcaagagaactggaaacaaaacgtccacataaaaacttgaatgttcatagcagcattattcataatagccaaaaggtggaaacaacccaaatgtccatcaactgatgaatgtacagacaaaacttgatcatatacagacaatgggatattatttatccctaaaaaacaaaggaacagccggacccagtggctcacgcatgtaatcccaacactttgggaggcctaggcgggcagatcacttgaggtcaggagtttgagaccagcctggccaacatggtaaaaccctgtctctactaaaaacacaaaaattagatggatgtagtgccacgcgcctgtgatcccagctactcaggaggctgaggcacgagaatcgcttgaacccaggaggaggtggaggttgcagtgagccgagatcacaccactgcactccagcctgggcaacagagtgagactcttgtctcaaaaaaaaaaaaaagaaaagaaaaaagaaaaagaaatgaagtattggtgcatgccacaacatggacgaaccttggaaatgttaagtgaaagaagttggatacaaaaggcctcatagtgtatgattgcgtttgtatgaaatgtctagaccaggcaaatccatagagacaggaagtagattagtggttgccatgggctaggggatgggaggaatgaggcatggctactaacagtggtcattactaacagggtttcttttggggtgataagaatgtttgcaaaggaaaaataaatatcactctcaatgtattatttccttcccacattctggcacatactgctgaagtgctttccagagaaggtgtgtgcgtttctcattacttgtcatccttgttaggagtcagaatagctattttctaaatctttctaaatttgacagatgaaaatgtacatcattctttaaatatatggctttttaatggctggtaagatcgagtatttttgtatgtatgatttttatcatttattcattggattttcttccacttcttaatcttatttatttatttatttatttatttatatttatttatttatttagagaccgagtctcgctctgttgcccaatgtggagtgcagtggtgcgatctcggctgactgcaacctccacctcccaggttcaagtgattctcctgcctcagtctcccaagtagctgggattacaggcacccaccaccatgcccgtctaatttttttatttttagaggagttggggtttcaccatgttggccaggctgttcttgaactccagacctcaggtgatccgcctgccttggcctcccaaagtgctgggattacaggctttaatcttatttaaatgaggatccaaatgttttcttattgcctgttccacatcttttccttttagcaatataaaatagcttttatattgccaagctgagcccttccctcttctagaacctttgcatttaggaaggtgtttcctcaaggtaagatagagtaggcatggaaataatcgattagcatttgtgcaactaaatggcccatggaagttgtccagatcaaagattagtcttcccaaatttgctttccctccctcttttcaaataaaaccattttcagctttgaagtaacaatattttcagagtctgtatatatctgcatttgtgaaataaagctgacttggcctttgggtactgttttttagatacattcctgaacttcatttgttattattttataatatatttcctagtcttcagagttagaatatgctaaccgtgcaaagtcagttgggctatttttattcctatgctccagaaaaaaattacttagctaggaattatctgttccttaaaagtttgaaagaggctgggcgcagtggctcatgcctgtaatcccagcactttgggagaccgaggcaggcagttcatttgaggtcaagagttcaaaaccagcctggccaacatggtgaaaccctgtctctactaaaaatacaaaaattagtgggcatggtgttgagtgcctgtaatcccagctactcagaaggctgaggcaggagaattgcttgagcccaggaggcagaggtttcagtgagcagagatcacaccattgcactccagcctgggcaacagagtgagacactgtctccaaaaaaaaaaaaaaaaaaagtttaaaagaatgtatccataaaactttatgggcctggcattttgataatattttcaatttatttcattgataatattcagttctgtgtttgtaaagtcagttttagtcatttatactttagagacgcatatagcatgttcataattctcttcagatgttttctttttctggtcatatatgctgttgagcaggaggtttgcagcctccgtgccagttgaacttgggcctctgtcatctaagaacagagctgcaggcaagttcatccctcccatgtctatcagcagcttccccctgtgaagaaaagctgagcctgttactcctcctcttaaaacactgtaatggcttgatgttgccatcaggataaagcccaagcttttctcacagcagagaggccattttaggttaggccccagccaacccctcctgcttgtctctcaactcttttcctaacctgttcatataaatcctcctcaaagtaaacttcctccaggttcctgatgcctggcctttcccgcgctggaccttggtgcatgttgctttcacctgggtcccccaattcctctaattaagccctgctcggcccttgggactcgactcagaagccaactcccccaggagggcttttctgactgacactcacatggttatgtaccctgtgtctgtgcctccccagcctcacccttcttctgctctagcacttacactaattattttaattgcccctttagttctttgtgtttgtcattagattggaaatggcaagggca

SEQ ID NO: 605 - DNA, 1691 bp, Homo sapiens
gaggcgaaccggagcgcgggaccgcggtcgccccgaccagagccgggagaccgcagcacccgcagccgcccgcgagcgcgccgaagacagcgcgcaggcgagagcgcgcgggcgggggcgcgcaggccctgcccgccccttccgtccccacccccctccgccctttcctctccccaccttcctctcgcctcccgcgcccccgcaccgggcgcccaccctgtcctcctcctgcgggagcgttgtccgtgttggcggccgcagcgggccgggccggtccggcgggccgggggatggcgctgctggacctggccttggagggaatggccgtcttcgggttcgtcctcttcttggtgctgtggctgatgcatttcatggctatcatctacacccgattacacctcaacaagaaggcaactgacaaacagccttatagcaagctcccaggtgtctctcttctgaaaccactgaaaggggtagatcctaacttaatcaacaacctggaaacattctttgaattggattatcccaaatttatttttctcggtagcaccaatgaaaagaatagagaagacacagatgtgatatatgaagtgctcctttgtgtacaagatcatgatgatccagccattgatgtatgtaagaagcttcttggaaaatatccaaatgttgatgctagattgtttataggtggcaaaaaagttggcattaatcctaaaattaataatttaatgccaggatatgaagttgcaaagtatgatcttatatggatttgtgatagtggaataagagtaattccagatacgcttactgacatggtgaatcaaatgacagaaaaagtaggcttggttcacgggctgccttacgtagcagacagacagggctttgctgccaccttagagcaggtatattttggaacttcacatccaagatactatatctctgccaatgtaactggtttcaaatgtgtgacaggaatgtcttgtttaatgagaaaagatgtgttggatcaagcaggaggacttatagcttttgctcagtacattgccgaagattactttatggccaaagcgatagctgaccgaggttggaggtttgcaatgtccactcaagttgcaatgcaaaactctggctcatattcaatttctcagtttcaatccagaatgatcaggtggaccaaactacgaattaacatgcttcctgctacaataatttgtgagccaatttcagaatgctttgttgccagtttaattattggatgggcagcccaccatgtgttcagatgggatattatggtatttttcatgtgtcattgcctggcatggtttatatttgactacattcaactcaggggtgtccagggtggcacactgtgtttttcaaaacttgattatgcagtcgcctggttcatccgcgaatccatgacaatatacatttttttgtctgcattatgggacccaactataagctggagaactggtcgctacagattacgctgtgggggtacagcagaggaaatcctagatgtataactacagctttgtgactgtatataaaggaaaaaagagaagtattataaattatgtttatataaatgcttttaaaaatctaccttctgtagttttatcacatgtatgttttggtatctgttctttaatttatttttgcatggcacttgcatctgtgaaaaaaaa

SEQ ID NO: 606 - protein, 412 aa, Homo sapiens
MALLDLALEGMAVFGFVLFLVLWLMHFMAIIYTRLHLNKKATDKQPYSKLPGVSLLKPLKGVDPNLINNLETFFELDYPKFIFLGSTNEKNREDTDVIYEVLLCVQDHDDPAIDVCKKLLGKYPNVDARLFIGGKKVGINPKINNLMPGYEVAKYDLIWICDSGIRVIPDTLTDMVNQMTEKVGLVHGLPYVADRQGFAATLEQVYFGTSHPRYYISANVTGFKCVTGMSCLMRKDVLDQAGGLIAFAQYIAEDYFMAKAIADRGWRFAMSTQVAMQNSGSYSISQFQSRMIRWTKLRINMLPATIICEPISECFVASLIIGWAAHHVFRWDIMVFFMCHCLAWFIFDYIQLRGVQGGTLCFSKLDYAVAWFIRESMTIYIFLSALWDPTISWRTGRYRLRCGGTAEEILDV

SEQ ID NO: 607 - DNA, 1637 bp, Homo sapiens
gaggcgaaccggagcgcgggaccgcggtcgccccgaccagagccgggagaccgcagcacccgcagccgcccgcgagcgcgccgaagacagcgcgcaggcgagagcgcgcgggcgggggcgcgcaggccctgcccgccccttccgtccccacccccctccgccctttcctctccccaccttcctctcgcctcccgcgcccccgcaccgggcgcccaccctgtcctcctcctgcgggagcgttgtccgtgttggcggccgcagcgggccgggccggtccggcgggccgggggatggcgctgctggacctggccttggagggaatggccgtcttcgggttcgtcctcttcttggtgctgtggctgatgcatttcatggctatcatctacacccgattacacctcaacaagaaggcaactgacaaacagccttatagcaagctcccaggtgtctctcttctgaaaccactgaaaggggtagatcctaacttaatcaacaacctggaaacattctttgaattggattatcccaaatatgaagtgctcctttgtgtacaagatcatgatgatccagccattgatgtatgtaagaagcttcttggaaaatatccaaatgttgatgctagattgtttataggtggcaaaaaagttggcattaatcctaaaattaataatttaatgccaggatatgaagttgcaaagtatgatcttatatggatttgtgatagtggaataagagtaattccagatacgcttactgacatggtgaatcaaatgacagaaaaagtaggcttggttcacgggctgccttacgtagcagacagacagggctttgctgccaccttagagcaggtatattttggaacttcacatccaagatactatatctctgccaatgtaactggtttcaaatgtgtgacaggaatgtcttgtttaatgagaaaagatgtgttggatcaagcaggaggacttatagcttttgctcagtacattgccgaagattactttatggccaaagcgatagctgaccgaggttggaggtttgcaatgtccactcaagttgcaatgcaaaactctggctcatattcaatttctcagtttcaatccagaatgatcaggtggaccaaactacgaattaacatgcttcctgctacaataatttgtgagccaatttcagaatgctttgttgccagtttaattattggatgggcagcccaccatgtgttcagatgggatattatggtatttttcatgtgtcattgcctggcatggtttatatttgactacattcaactcaggggtgtccagggtggcacactgtgtttttcaaaacttgattatgcagtcgcctggttcatccgcgaatccatgacaatatacatttttttgtctgcattatgggacccaactataagctggagaactggtcgctacagattacgctgtgggggtacagcagaggaaatcctagatgtataactacagctttgtgactgtatataaaggaaaaaagagaagtattataaattatgtttatataaatgcttttaaaaatctaccttctgtagttttatcacatgtatgttttggtatctgttctttaatttatttttgcatggcacttgcatctgtgaaaaaaaa

SEQ ID NO: 608 - protein, 394 aa, Homo sapiens
MALLDLALEGMAVFGFVLFLVLWLMHFMAIIYTRLHLNKKATDKQPYSKLPGVSLLKPLKGVDPNLINNLETFFELDYPKYEVLLCVQDHDDPAIDVCKKLLGKYPNVDARLFIGGKKVGINPKINNLMPGYEVAKYDLIWICDSGIRVIPDTLTDMVNQMTEKVGLVHGLPYVADRQGFAATLEQVYFGTSHPRYYISANVTGFKCVTGMSCLMRKDVLDQAGGLIAFAQYIAEDYFMAKAIADRGWRFAMSTQVAMQNSGSYSISQFQSRMIRWTKLRINMLPATIICEPISECFVASLIIGWAAHHVFRWDIMVFFMCHCLAWFIFDYIQLRGVQGGTLCFSKLDYAVAWFIRESMTIYIFLSALWDPTISWRTGRYRLRCGGTAEEILDV

SEQ ID NO: 609 - DNA, 119057 bp, Mus musculus
  misc_feature (1)...(119057): n = A,T,C or G
ttacttggacgtactaggaatccaacccagggccttgttagtaggcaactgtcctacactgagctacagcctcagccagaccttttcggtccatatgctgcagcctagtgcagctacggaaaacaggaagagggtcctgaccgctccctcatgaggtgtctgtcccctccagtcctggcaacccttaacaaaatcagtccccactcctgggcggcagcagttattccagtggcctccggattggttgtcagaggacagcagaggaagctggagacctgggaggcagcatctgcttcccagcagtcgatgtaaagtgtcacagttacctctgtgcctgtcaagtggtcggtttgtctttagtgacaatcagagccttggtggagcctgcgatctgagctggttttctgtgctttagttttgccttttgtttctaagacttgggtttttgtttgtttgtttgtttgttttagttatgtgtatatgtttgtctaagctaaagggatgagttgtgtgtgtatgtgtgtgtgtgtgtgtgtgtgtgtgtgtgtgtgtgtgtgtgtgtgtcctgtggaagtaagtgcaggtgcccacaagaaggagtcagatctctctaagaactctttccaggtgctctcccatggtcccctgtctgccacctagaggccaccccgagctgctcaggctggacctggagcaggccttgcttcctcatggttcatgcccatggatgagcaaggctgttatgctgacccacttttgctgtgtgcccacagcaggctaagcctgtctggccttgctccgaggcaccaggcggagtaagttgccttctgaccagtgtagacggctgtctctggggtgtctgaatctgtctgttatgtctaaaggacaacctccaggcacctcggggaagccggaacatggatctagtcgtagggtctcccttgccccgcattcagcctgtgtcccagcagccctgtgttaggacccattcttgctggtaaccaaaagctgggcttttctcccaaggttttaaagacagattccaacacgtaagctacaacctgcggacaccttccctgagcactatgagcctcagctgcttgttgagcctcctagagggcaggaaatgtcctgtccttgaggggttgccaccaagtaaaagggtcttgggtgtctaatgccaaggaaagggagatttagagataccagagacagaggcccagcagaggatgatgggagtgccactcgaagattgacaggttgtcaatcggggctttgggtgctacaacatgatctgtgtctcctgaactatggggctgtgttgattgatgtatatctcatccctccttcactccacacacgcatgcttgcttcttctatttctagcccaaattatgtcagatcgcggtccgtgggcctagaacgccgtctcttggttgctctggttggattagagtcaggatctgatggctatgcttaaataagctgatacgtatgaaaaccataagctaaaccagagctttagccatggctggtctcaccagcacctatgttcatatatagccatgagccttgagaaaggtatcctgggcctaagacttctggttctgaaacatgccagggctaagaggattttgcaagcaaaagtgcatttatctcatgaatgaggacctgaacctcagcatttgagggacagggtgggggtggggggaggcagagctaggtagagccccagagcttgctggccagccagcctagccaatcagtcagctccaggttcagtgagagatcctgcctcacgcacggtaagctagaaggaaaaggaggtggctcagcaataaaaacacttgcccacccgagcctagcagcctgggttcaatccctaagatccatagtggaaggagagcgctaactcccaaagtggccctccaacgtccaaatgctgcggtatacacatgccgactttgacctctggcctctgctgtgtatgcaaggtcaagaacacttgcacatatacacatggaggaggtggagggaggaaaaagaaagcctctgtcctgcttgcaaagcctcacaggggatgctgggcctctcctttgaccagccatgccctaggtccaggccaggcttacttcacactcgaccatagggaagcatagcaaaaatggtcttgttctgtggtcaggagaggagcagggcagccatagtgggttcctagcctggatgcaccactacactaaactgtgcagggccgaataagaaggaccttgtgaggggccagagccttgaggacatctggataggactgtcggtacaatttcagttccttcatgacatcaggccaagagacaaggagtagctaaccacacaaattgaccggagagttcccaacacaccctgttttctcatgaccaggacatttgaacaagctgtgccagccagcccttatgcactcagctgaactgtacgagagccaactgaggacagacagggaggtttaacctcacggataccttttaaaaggaagtataacaaatcacagtcctgtgaagcaagaaaacctcttgctgctgctgctgctgctgctgctgctgatgctgatgctgatgctgtcttagatattcccctcgcgagcttcctgtagcctgggagctctgctcagacctggtgtgatcagaggcagtgggcagtgttcaggcagacaagacactacctgaactctaaatgaaagaagtaaaggtgtggcaagggagaggaggaggaggactcagtgctaactgctgatgctcggtccgtcttggtgtgtggcatcagatagaccggactggattccagatagcctgtttctagccactgtcttataggagaggagaggatcctagtggtgtgtcctcttgtctgtggaaggcaagtcgtaaccacatcagttactgatgacatcatcagacccgggatccagcaaaagccaccacaagaccagaggaggagaggttgaaggcattcaaacctaaatccagctcacactcacactaactctcctgcctccaccagccagtggttcacgtgaaacatcccacgtcttggttaaacgttataggaaactctgatgttaatccccgacaccataccccagtgtccaaactagtttgatttctgtgcccgagaacatcttgtttctcttttgctcccttcgaagccttaagcccatttaggatgacgttttccagactcagcgggatctcctggaacacagctacctggagagagaaacagggccccacaccacacagagaccctttgggtttgtctttggcagtggctcccaacaaagactgtgtgtgactcagccacaagagtgactcataagcctcctgcccctcttactgatttcactaggcatccattgtccacaccctggccacatactgtcactcaggacggaccacagtgtggcttgaactctcgtaaaaggggccgcccagagggaatcttcagggatggagaagtagatgacaaagattacaggaaccttgtggactgttacaatggtccttccgcccagatactgcagccatttgtaggttggaaaggcttgtctgaccaaaggtatcattgtaagttgatttaataacacattttctaactttctccattcattccttcatgaactatgtcatcatttccctgaacaatgaatcaccatgcccttggaagaaggcaactaactataaaagaaaaatcagagtcacaaaaggcagatgaagccccagccttggccttgtagatgcttgtggcagagtttctggtagtcgggggagctctgtgggggtctggtcatgggctcaccctgggctctctgtgaaaccatgggaaaagctcttgagatgtggcttcttgtggccagcgctggattcaaccagagttgccatcaaatctgtcagactggctcttccccaattggggaatgtgccagaacttgagaattccataattgaagggaagctagggattgtggaggcagctgctgcctctctggttttttattgcctgtttgtcgaggaagaatcacaaggtagaagtcacttcctactttcccccaaatgatgagggggaacatctccagttcattagcacctgtccttcaaagcctttttataacagaaaaaataatgagaaaaaatgctgtccatctccggacctgaggcccctcatcagggcctcctggcaggacagaaggtacattcactgttcacgagagataaacccagccagtggggagatgtgtgtgcttactgtcccctgttttgatttcaacttgttcttgttttccgagttttgattttcttcctttgaacaaactaaactcaccatgttttgttggtttagtagagaggagaattgggattttccagctaacttgggacctgtaattcaaaccacctcccagccaatttgaaaacatcacggttttattttgtgaaaacatcggccttgcagcacaataggcttaaggaggtcatttcacggaacactcatgatgacacagagcgatgcactgggcctataaagatgctacagaaagttcaaaatggctctagagataatttaccaccggcacacactgcttggccctcagcctactttaataaataaagttttattggaacacagccgtgtacctaatgtatatgtggtcaatgcctggttgaacacggcagttagtgttaagcagtcacacaaagactatagagtttgctccaaaactatttaccagctaccaaaaccagctttaattaaaaaaaaaaatactgttcccatggcttcgttttaaaggatttataaggatttcttttgttttaataaataagatcacaggcccgtgacttggacaggattacaggctgataagaaaaatccttgatcacaaaggttggaggaatccttcttcttctgggtcacgagggaataagatgtgttttgactataaataaagttcatacattgtttgtgaggttctcagggaattgcaggtgttatagctgagaggcacaggttaagcccagaggtcatatgtatcttggccataacatggcttattgttttttaatttctttacttgagcatattctaatagaagaattgacactgtctttgtgttgggcagtctttacagaaaaatcttttcactactctccaactcttagccctcagaaggtgggagacttcatctgcattaccaggatcccgaccatctccactcggctgcagattcttgtaatctctgttgtaatgagttgactgggacaaacggagtagatattgcacaaagagggtctattaaagagtgcagaaatgctctcagggtgagagagtggccagtgaggaaaagtctctaacagaggagtacagatgatagccagagaccactgtattggcctaactttaggcagagtttatgcttatccttaagaatctcaacaattataggagccatcagtagcacgcagcccacacaatcagctgagcaaggctcgtagggggctcacagagactgaaccgacagtcggggagcctgtatgggtctgagccagatcctctgcaagtatgtgatggctgtgtacctcggtgttcttgtgggacttctaaagtgggggctgggaggtgtctctcactctttgcctgctcttgggacccttttcatcccactggattgcctcatctggtcttgatacgagggtttgtgcctgctcttattgtagtttattgtatcatgttcagacgatatccttgggaggactgctcttttctgaaggaaaatgaaggaggggtggatatcggagagagggtaggtagggaggggctgggaggagggaagggaagggagcccatagtcaggatgtaatgtgtgagagaagaatgaagacataaataaataacaaaaacaaaacaaacacaaactcagccgtcctcctgatcttgggcaccaagaaactcatgcctgctcctggtctgtcaccaataaaaagaacttaaaacaaaacaaacaaacaagcaaaagaatccagaacaagaaagctttcctgggaatttgatttggattaactctaaagggagggtatactgatatctgttctttaccataaagccacaggctaattaataatctaatgactttctgagcagtccggactctcatgagctcacccagggcctgaggtactttgaggcaccattcttttgatcagcaatcagagcccggtgccttggtccctggttatatctaactagctacctaactagctacctaattcaaggactctacatctctttaattttcctagtgtcttacctcatttccacatacattgcatttggtctcatctggagacccagctgtcagctgctagccccaggcagaccctgtcacctgtctgcctcactgtgtgctccaaaggcaaatgtgtgtagcaccagaaaactgtcaccctctctccttttccagtccccaatgactcagagccaaagttctaatccactgggtaataaataagtgactgaacgaaagaatgttccagagtcctcagggcagaagtttcacctgggtcatataaatgttatttggagccttgctgtgtaaaacatgtattctgtcatttcctcctctgtttattgcattcccacgagttccatttcatctttcacttcttcccagccttgaaacatcctatgatgcgtccctgggtccctgctatcattaacagaggctcccctccatgtgtatacacacacacacacacacacaccattaataggtgacgacgataatccttctcccaaggaccccctcacccatggcaccacctcccactgctaaccctctaagatcattgctgatactgggagtaatagtgactggagttttaatggtttgtttgtgccagggactatgctgggatttcttgtggatttgctaatctcacctactaagcacagaaagggaggccctgctgctgtctccactttgcagatgggaaagtagggctggagcttcttcacacgagctgtgtgtgagatcacattagcagaggcagagccagggttccagctggacggctgactgcctttccctgagatgtaggacagaacccgccccttgctgctgctccgacattcactattttagttcccacatatgactggtctcacatgctcttctttctgagtctggtttatgccacttaagataatgtccttcccagacttaaggagggcaaatggctgattgggaggtattgggaagaatgttgaatgtcactgatcattagagaaacatggtctgaaagtatgagatagccccttagcccttcaatccaggtaagatcgtggtcaaaaaccagaagatggcaagtgtggaagcagatgttggggaaagaaggctttgtgctaacacaggaagcagtgtggctcttcctcaaaaaattagaacaggaagtacccaggcatctagccagcccaccactgagcatacattcaggggtgttgatgccagtgtgttgacgttaaaagtaagttattaggcttactgagtaatggctcttgttaccaaatccgacaacctatattctatcccaagactcacatagttgaaggaaagaaccaactcctgaaatttgtgctctgacttccacatgtgcactgtggtgcatacacacacacacacacacacacacacacacacacacggtgaagggaccagagagtgggactaaataaagcaattaaggacaagttaataaggactgtagccttattattaatgcactcatccacaggatgagtcatagtgacagcacaatgctagaggaggccacttgacctctgtatcttcctctccaagtacccatgagtgaatgtgtgcagttgacatgagcatggccattagttttcagcgttagttttgaggaggattggagttctgctgatggatggtggaggtggttgcactacaattcactcacaaatactcacaatgccatgattcactacgtgtacttcactgcagtttttatagtaagaaagtaatatgtaggagaggcatgggaagtgacagagatgacaaagccttgggaataggaggcccactgggatccctgggcagctgttgcatttttaaggggagtagtttgactagcaggtttcaccaaccagagaactgctagcaaggacttgggagagagaagtgagagaagaaatgagcgcaagtcactggagctctgtgaattcaaaggactataagctcagaaaaagaacagctgttagtcaccattggatgcctagtttgtggtgtatcatgcagttaggatctagtaccctaagtgtctcatccctcccatagatacaggagttctgtagatacagttagtggacctacaatcctaccctggacactccccactgccattgcccttggcaggacagaacccgggtaggacatcactgaatgaatttcccccagtatctttcaccatcaagtgttgaggagattctatctggagagtgtctaatgcacacacatgcaggcgtgaagcctgtgttaatgtgatacaaacatcagatgataaatggagtccccatggatctacccctaaatccacccgaaagggccatggggataagcccattgctacagagtttctttcctttgctctgggtcaggtatgtactggtacatgtcggcaagcaagatcacgagatgaaagccacctcagtaaaaattttatgtaaaacttcaaagacgcagagtagttgctggtacatctgccaagtatggagtttaaaagtctggtgaggaacacaagatgagggtgaggctggggtgagttaggtcctggggacttgggaaatacatgaacattcctggaccattgagtaatcttcttcatccatgacctttaaggaaggactatggatcacacttctgtggggctgagtcctcctggtcacatatagagagagggtttgtatcttgggatgaaccaagccaagtgcagcatccctaggacatcatgagcatccagcaagagcagcttgctagtatccagtttgagatggagacacagtttcattgggaagggaccctgggacaattctcaacatgtgaccaggaaacacctagatctagttttgaaaaataatgattgtttgctttattaaaaaaatttttttaaaaagactcattctccaagactacaatggatttttcaagaagctacttcaacatcactctgataatacctttcaactcacaggcatctgtcaatgtggtctaaaacaaaagtcgtaaaaatacttgaaacattatgaggcgtgtgtgtgttatgtaggtgcacatgtgtgggtgggtgtatgtgcctattaggcacatctggaggacagaggttgatacagctttcctctattgttatcccccttcctgccaccataagttccttcagtgaacctggagctcggtgtctcagctagactggctatccaatgagtccctatccacttccctgtgctccccagtgttgggtttagagacacactaccatattcttgaatgctagatcccaaactcagatcctcacacttgcataataaacacttgagccatctccccagcacgatcctaagaatttattgcagtttcatttggttgtgtggtcccaaagcgtgttgttccaacagtgtgctgccctgttaggttagacatgcctgtacctgatccctaatggcatggatgcttgaatccaaacaagtctgcttaaactcacatggacaagaactttggaatcctcagtgcattttgggcacacagcaggctgctgtgacctgtaaggtcaagaatcactgggttgaggtgtgcatgttagataagaccaacatagtgacaaccatcaaaacctgtaagaaagatctagaagcagaccactatcatcagattcctttttctgttttatttagcaggcaagactgcatagaaactctaatggacgaagatgagaaggatagagcaaagaggtgagtgaagactgcccctgcctcatggtgcatgagacatttccacgctattaaactcaacatggcgggcagctgtgggatgcggctccctgaaacatttcacagtagctttaagatttgcacctcaccagtgaagttgtcgttgtgtgagacttggcaagaagtctgtgtttttagtgtgcctatgtgctaccctgatgacaatggtcaccatccagaggcctccagtttctgcttttacaagacaggtgctgcttggcgagacaggctgatgggagccactcaggcctgtgttcaagctctggggtggtgttggggtgctgcctgactgtggacagcaagagcattatcattatcccactattcctctgtccacattcagttgttactgagagggcagtggctgagcactgcctttatattagctcagtttcttcatctgtgtagtagcagcatcatgactccttgtaccatggttaaacagtcgggatttactagcctggtagtcattatgttgaagcacctacaaccctacctatatttattcctttaagggtattcactggatacctactgtgttcaaggtagtcaagaagttgaggtcgaagatcaaaagtggtcatcaacgtgacacaacccacccaagtgggcaatcgctgtgcaaagcttggtgaaccaagaaagcaggggtgaataaatgaactcagtccccgcaggaatgcacagctgatgagcgacagggcatgttacagaccattggggtacaagggacagggcagcagtagagagaaacatgaaaggctagtcagcggaatgtatgttacaggcccacaaacaagcccctcccctccaatctcataaagatcttttctacaccatatggggcaggtactctgttctctactgtagcccccctcatgaacctatagagatgaaacacatacctacatccctcaacttcatgattgacttgcaagtagttgagtccccagagatcgccccttgtgtggcctcaagaacaactgtcccgtgaggagaaagccatgagagacaccagtccacagccactcacaaagtttctcagtctgaagctacaagaatgagggagtctggactgtttgaacctctccttgtatttatattagcagaaggtcagtgtgttgactggcaacttcgatgtggtcagagtgaggagcaggaaggggtggcccaggcatcgcctttgaacatattttacttgttctgaggcagccaggactcagggaagaacctaaatctcacacacataaggttatttgacgtttatctccactctttcatatgcacaagcatctgcagaaacagtcaacaatgaggcccattagctctttttttttcttttttaattgggtatttatttcatttacatttccaatgctatcccaaaaggcccccacacgctcccccacccacttccccacccatccactcccacttcttggccctgttgttcccctgtactgaggcatataaagtttgcacgactagtgggcctctgtttccactgatggccgactaggccattttctgattcatatgcagctagagacacgagctccagggggtactggttagttcatattgttgttccacctataggattgcagatcccttcagctccttgggtactttctctagctcctccattgggggccctgtgatccatccaatagctgactgtgagcatccacttctgtgtttgctaggccccggcatagtctcacaagagacagctctatctgggtcctttcagcaaaatcttgctagtgtatgcaatggtgtcagcgtttggaagctgattatgggatggatctccggatatggcagtctctagatggcccatctttttgtcacagctccaaactttgctcttgagcttattcagaagcaacaagtgctgggcccttcacctggtcctaggaatctcagcctcctctggaaatgcttcgcaaccccgtaggtcacaagttgtaaggtttgcaaagtccatttgtggccctcaaacaagtaaatgaatgaacttgattgtaatgacaattctgggatttggggttcttttaacgacacagaaatattctaaaaatgtgtttttgtcttcgtcccaggtgtggggatactggggctgctttgcagcagatgattatggtttgccttgtgctctagcagaggcgtggttttgccacagatctcccattctcctggaatccctgtacagtgggctattactgttcctacattacagtagagaaaccctaggacctgggattccacagcccaccagtagccacagggatcaaatctcaatacacctggcctcctctcacactcaagtagaagctgctgccttcactttgctttgtgctcaaggggcgaggcaacaagtgctggctgttgctttgctcaaagaccctgagaatctacagctcttctgcatcatgcaactgtttttgcttcacatgctgctaatgaacagtggatgttcccttcatcctctgtcctggggttgaagaaatacctggtctcctctttcacttgactaggaagttgcttccgtaagtccaggcatttggttgaggtgagaggagggggagaggcgatggctttgttgcatcttattcaagaaattcaagaatgtccagaaagattagctggttcagggttcgcagtagagggactgccagatctgaaatgtgagctgaactcttgtttattctttaatccctagtccttagactcagcatggtttgggcaaggggaaggcattcaaactggacaagcaagaactctggaccctccactacactgaggtagccatttgtgagggaaagggccagtcattcccaggtgtgttatttcttctcagttcccaggtggaagagaaggacatggcccaatgactaggaccatgtgtggtttgactaggtttggcccccgtagactcacatgtttcaatatgcttggcccagagagtggcactattaggaggtgtggcgttgttagaggaagtgtgtcactgtaggggtaggctttgagagcctcctcctggctgcttggaaaacagtcttctactagttgcctttggaacaagatgtagaactcagctccttctccagctaatgcctcctggaacactgccatgtttctcactatcatgataattgactgaacttctgaagctgtaagccaggtccaattaaatgatttccttgataagagttgctttggtcatggtgtctgttcacagcagtaaaacccaaaataagacagatcttctcattttcattaactgagttatacagtaagcaacagaatgcttgggaagaaggcacatagcattatccttccttccaagcacacatgatggggagcaatcatggaaatagtcataaaggagaaaccagagcccacagtcagtgaggcaaagccaggagagcaaccagatgtgtgagctccgccttttcaccaactgctttgcacaggctgatcttgtttcattgacatggttcctttggccataattaacataggtctgaatggaaagtctcacaggcagaagactgtagccatcatggaagagtctgagtccacataggcttgcagagtaccacgcctgcaggagtcgggcaggacacaagagcccagccctgaactctgggctattgctgccgttggatctcagatgctaattttgctgtgatttcccatcctaggctttggacttgattttatgtatctcattatgcatcccatcgtggggtaaaaatgacagccatcgttgaggcttcctctatttgtttggatggtgattaaggcagaagcagcaggcatcacaagaacagggcggtaacgggacacgggattcattaatattaccctgtaatttccagatgagtgattctgtcctcaaaacaaaggggaaagtggagctgtgcttgcaggcagaatgctaattcttcccatggcccagtaacagcagagtggggaagggggctccctcctctggggtctttcatctcctaccttgctgggttctgttctttttgactaaagaggactgtcatcagaaatgtgtgcctgtaaagtttggaaacctggggctgtcttggctcagggaaacccagaatctctctgggggcatctgaggtaaagaataagttatttaaaagcaagctcagtgaactcaataagtggccaactaatcaagggtggccagaagtccaccttcttgaacagagcatctttctttgggcaaggccatccatcccttcagcattttagtgacaagctgctaaggaccagacccaagttaaatgaggcctgtgtgagtgttaactaagagtcactatgaaattaggccagcttcccattgggacccagacgatatttctgaaaatggtagttaagaggaaaaatgtccctgtaccatctcaggagggaagaaatggccccgaagccactccggattgccagccaaccctgcagagaagtcacggtgaattcttaaactttgccccaggtggcagtgacctgacccatcttaccccacatggacttgtctgccctaaaactcacatagcatcttcttccacaaactgcttaggcctgtgagatacagcctgagttatagaatgcagcttgtgtcagccacgggggccctgggcagcaaatcatggcaaccatgctgaccttcagtgggcctttctttgtgtttgagttacccaaaatgtgtttggggggagtaatctctagaaatgctccccaaaacaagtttcgacaatgccattaaagatgctaaaacatcatctagcaagcaagagttgttcatttacctacagtgctgccattaaatcttaatctaggaaaaaaaaaatacagcaaaaaacaaaatcggctgttctgaccatgtactttcccatttccataaataactctgaatagaaggccctttgacccacattgtctttgcagcagacacatggacttaattgcaaccctttctgtatctaggaaggctataaaagcagcatttgaaaaatattgaagtatttaaagatcacttacaatgccactacttagatggctgcccttagattttatttatttatgtgtacatagtcgtgtgtgtatgcatatgtatgtacacctgtgtatgcttgcatacggaggccagaggttagcaatggatgtcttcttatagttcttcatcttactttgtgaggcagtgtctctcactgaacttagagctcactgatcaagtcccagacatcctcctgtctctccctcccagcactgggttcacagctgttcactgccttttatgaaggtgctgaggatccagactcagtccctgtgtttccatagcaaccttacccactaagccaaaccccaccaagccccagatgcccatgtttaatatttgagtacatttactgttaagtcttccctagtatttgatctagttttactagaaccattcataagattttagttaatattggtgaacatattcagttcactcttccgaaaagctcatctttcatggacgggacagtattgatgtgaggaatgtttcaaatttatttcattcttttgaacattacatgtccagttgcatctttgggagttgcctgtgaatacctaattgatatctttccattctaaacaaaacaaaacaaaaaagcaaacaaaataatttagtctccttctgcagctgtaatccacacctgtgcacgcacacatacacacacacacacacacacacacacacacacacactcggtttcagggtctgtgtagcctaggaaagagagctgagtctatttccaaaatgctttctatacaaattgagtttgctcagcttatagaacttgtatctgggagactgcatcttctaacaggaagctgttagacaggtaaaatggggctgaatatcccaatatagacagaacttgaaggataagtgtgttgatatccataaaggaatggaagagggggaggaagaaggaaggagagaaaggggagagggagggaggaggaggagatagaaaagacaagcaggaacaacaaccaaaaagaaagagtgaacaaacagaaaacagattgtaaaatgatatcttaaacccaaacctggatgctcacgcacacatgtacacacagagaggagaagggactgggggtgaggacagaagcaagcacacacacatgcacacaggcacacaaatacattgaatataaagtatctaaatatgacacagattgtcataatggggttttagatttacttacttctaattaggtgtatatgtctgtgtcgggtctgtgcacagagtgcatgttctggtggaagtcagaggcatcagatcctctggcactggacccacaggcatttgtgagctgcctgaatacatgggcactgagacccaaactcactctgccatacctgacacactcttggaaccagtgacccatctctccaggtccactttagtagtagtagtagtagtagtagtagtagtagtagtagtagtagtagtagcagcagcatattttatgtaatctttgataatttcacacaatgtgtacacttttgctcatattcagccctattcctcaattcttcatgaccccttccccttgtccccctcctacttcatgctttcttattacttttataacccattgagtccagttagtgttacccatatacgcactcatgcaggtccattttctggttcatcctaccagcaattacacttgtcttagttagagtttccattgctgcagtgaaacaccatctccaaagagcagtttgaggaagagagggcttatttggcttacacttctatatagctgttcatcattgaaagaagtcaggacaagaattcaaatgaaaacatcgaggggcactgcttactggcttgctccatctgctctcttatggaacctgggaccaccagcccagatggcccatccacaatggtctgggcttctcccactggtcactagcaaaatgccctacaggcttgcctacaaccccatcttctggaaacatttctttattgaggttccttccttccagatgactttagcttgtgttgagttgacataaaactatgcagcacaagaaagctaactctctttacctagtagtcatcagctaccaacagctcctcactgaggatttgtgcctcatatgcccctcccccactgatgttagcctgtacttgtggctgtgcctcctctggctcttccaacctttctccctccacttctgcaatgtttcctgagccttggcacaagtgctgtgatacagttgttccatctgtgcctgatcactccccagacacccattctctgcacttggacccatcgtggatctttgtattaaccatccaccacacaaagacagacagaaagctgcagaaatctatgggtataaagatacatttttagaagacagcttgatacagtggtggtttagcaaaagcaaagcaaagaggtctctgtaagagcaaggaggtcgcccctggagcctgtgagctcccagtcctggggttcttgtgagattttcagtaccaggcatgagtttccttctgtggagtggttggttaccccgacaatattcatgacgacatggctgtacccataggtatgccttgccaggttaggtgttactgtagctccgacagttcacaactctgtaagaccatggatagcttttcttcactcctggcataatgaactctagtcagcaagagaaagcttccaggtcaataccagcttgatttttctaagtcccatgttcagagcatgagacatcttcggtaactgagtcttgccatcaagcagaatgataaaaaaaaaattaagaagttaaaaaaaaaaaaaagcaagcctaactgcatgctgtcacatgacacttacccacaaacctgatcctataggtaggttagaaataaaacggaaaattacatatgtgtgtgtgtatatatgtatgtgtgtatatatatatatatatatacatatatatgtatgtgtgtgtgtgtgtatatatatatatatatatatatatatatatatatatatgacacagacagtaattttaaacagtgatatcaaattatgttagcacatgaaatattactagggagacagatcaattcaccaaggaaagataacagttctattgctatcatcatgcaatgggtatctatacacactgaaaagcaagcacatccaaacctgtgcagcccagcctgaagaatcaatgggagattttgctgtgctgctctccgtcctgagccagtgagccgaagtgcagtggggatgctcagctgactgacatttctagaacaccccacacagcagtatcatcggaacccgattttcaagtacctattgaaaacgtaccaagagagaccaaatgtcgcttcatgaaacaagcgttgagaaatccaaatgaaacaaaattaaattaggaacagaaaaaaaattttttttcaggaaagataatctctggagcttagaaattaaaaaaaaaaaaaaaaacttccaaggaacccatggatcaaaaaggatgtctcaaagagtattggagaccatgtcaacccaaatgaaatggaaaatgccgtccggggcttcgtgctgcgggctgctgagcgcacagagagaaccctgcagaaccctggagccacatccaaactcccatcataacagtggggcctggaaagatggctcatctgttatgacgctgctgttgtggaggacttatgctcgatccctagcacccacgtcgggggcgggggggggggactcgcaactgctcgtgactctatttctgggggatcttctgaccatctcaggtactgcacacacatgctcaaattcatattcagacagacggccccaaacagagagagacagacagacaggcaggcaggcaggcaggcaggcagacagaatcaagggctgggaagcagctcagttagtaaagcttctattgtacaaacatgagaacttgagttcagacccctgaccctagcacccatgtaaaagccaggtatccatcactaggggtcaggagccaaaatagatggcttcgtgcatctcactggccagccagcctgtttgaaccaataagctctccggttagcgagaggctctgtctcagaagataaggaggagagcaattaaggactcctggtgttgatttctgtcctgtgcacccagagagcagagagcagagagcaggggtggggaatgaaggggagagaatataagaagagaaatagaagaacaaaataaattcatagaataaacacagccagccatggtggcccatgctttcaatcacagcactggaaagggaaaggaaagacctctgtgagttcaaggccaacctgatcacacagtgagttctaagccttccaggtgtatacagtaagtccttattgtcaaagagaagaacagcacaggtcgacaacattgaaaaataaaacaaataaacaagaagaaaaaaaaattggctaagcagagaggagatttttttttttttttttttttttttttaagaatcaagcaaattggcattgagattgagacaggaatcgccagtaatgagaacaagagaagacgcatggctacacagccttttgacattaaaaaggtcataaggaagttctgtgaccagctgtgtccatgtaaattcagatgagacggaacattaatttaataaccacaagcaaccagactcacacggttgataagagagcccgaagagtttgctggtgctttgatgaagttacaaatggaaactataaaagcccagatccagatggcttaattgatgaattctgaattctgccaaatatcgaaggaagaactccctccctctgtatgcagtgctctgcagaaacgaaaagaggaggaaacacactccagctcatttttgaagggcagcattacccgttgagcaaatgagaaaataaaccagagaccatgtcccttgtgaattcagacagaacattcctcaacttaaaaaaaaaaaatgaatgtggtagtacacaccttcccagcacttgggaggcagagtccaatggatctctgagttcgaggccagcctggtctacagagggagttgcgggacagccagggtatacagaaagaccctgtcacaaaaaaaaaagaaggaaaatgttggtgagccagctgggtgtagtagttcatacctgtgacgtcagcactcaggagctaaggtgggccgattgtgtgtgagaccaacctggactacatgataagaccttgtctctccaaacagcacaagacaaacacacagcactggtaattctcctctctctgtctctatctctctctgtctctgtctctctctgtctctgtctctgtctgtctctgactttgtctctctctctctcttctgtgtgtgtgtgtgtgtgtgtgtgtgtgtgtgagtggtaaagtcataatcaagtacaatttatcctaagggatgcaagacgatttagtattagaaatgactgagtacaatctaccactttaatacacagaaacccnnnnnnnnnnnnnnnnnnnnnnnnnnnnnnnnnnnnnnnnnnnnnnnnnnnnnnnnnnnnnnnnnnnnnnnnnnnnnnnnnnnnnnnnnnnnnnnnnnnnnnnnnnnnnnnnnnnnnnnnnnnnnnnnnnnnnnnnnnnnnnnnnnnnnnnnnnnnnnnnnnnnnnnnnnnnnnnnnnnnnnnnnnnnnnnnnnnnnnnnnnnnnnnnnnnnnnnnnnnnnnnnnnnnnnnnnnnnnnnnnnnnnnnnnnnnnnnnnnnnnnnnnnnnnnnnnnnnnnnnnnnnnnnnnnnnnnnnnnnnnnnnnnnnnnnnnnnnnnnnnnnnnnnnnnnnnnnnnnnnnnnnnnnnnnnnnnnnnnnnnnnnnnnnnnnnnnnnnnnnnnnnnnnnnnnnnnnnnnnnnnnnnnnngggagctatggtttggaaaaaacattgacaaatcccatattttccaaagaatttgtacccagaacataactttaacagcaaggagtaagcaatgcagatgaaagttgaagaggagagtgtcagtgaggtggctccatgggtaaggctcctgcccacaagcctctctggaaactccctgccgctggtagcaagaaagaactcactccacagatttgtcctctgacccccattggtgtgctgggatactcaagcaagtgcacacacacacacacacacatcaaatgtgccatatcattatgcaagatactaatgcaagtgaaaaccccataaagcaccaccgtccatttcttaggaaagttgggagttacgctctaaagccctggtggactgagaaccactggctcatttgtacgtcttagtgggggggggggggagccaccttggagaaggaggttgatagttgcttataaaagtgaatatgcaacttccctaggaaccaaccctcctgctcctgtattgtttatttcagagagctgaaaattttcacttgagaactagaaacagtgtttgtatccactctgtaatccataatgactctacccagaaaccacatgactgtccttcagtgggtagataagccagctgtgttcgtacagtagaaaattacttagcggcaggatacaagaagcgaggcagggatataactcagatgcctctgaaagacactgtgctgggcagaaggagccaagttggttcaagaaacagcatgctgggtttggagaaatcactcagcgaccatggatgctcactgctctcccaagggtcccaagttctgttccctggtcccacacttggtggctcccaactgcctgttgcaaatcatccgacaccctcttctggcttctgaagatacactcataaatatttaaacattaatattttaattcttgatcaaaatatagtaacatatttctctcccttatctccatcctccaacctatccaatgacctccgccatcctccatcttccctcccaagctcaaattcatggccttctcttctttaattattacagacacacacacacacacacacacacacacacacacacgataaatacccagatagaaattcgacttgctgagtccattcgctgtctcgtgtatcctatgatttcaggaatggctgcctggtattggatagacaatcagggagctcaatcccacgaagactaattttccatctcttggcagttgttaactgccagtggttcttcatctagcggtgggtcacatggtaggctcccattctacattggcatgtcagctggtactctcattgctcaggccttgtttaggaagctgtgctgttgagttttatggctgtagcttctctgtcatggctagaaagcatgatctcactgtagactccctgatccttttctaaagcaaatattgaaaccatttattgccattaagttacagatgtgaattacatatggatatgtatttgaatgcatatgaattactgcacccagacacacacatggagtgggggagagacagagagacagagagacagagagagagtgagacagagagagaaagagaaaagaaaattaccagtgctgtgtgcttgccttatgttgtttggagataacaagtgatacttgttaccactggaaattatgtgtagacatgtgaccaacgaagggttatactatagtcatgaaagaaaagtaaaaaattttgagtacttaagtgattgtagttataaaattttgattcccccccaaaaaatgttcccttacacatttttatcacacaaaccccaatagataatatatattactacagattgttatagataaaactatcattcaaaattattaaattagttgcatattttgaactacccttggtgaagacaaagtttagcattgataaggcagcagagggttggtttagggactctcggctatttaataatgtccgcatgatcattacagataatgtttcgtgttttcccctggcaagactattgatgctgagagactctgtggctggagcactgtctctttcaagagccggtccttgcactgctatgcagatgtctgcttactcatctcagagttgataagccgtccccacaatgagctgagctacttcatttattacacagcatccaaacagaagccagtttcgaggttgtgccttgtaggcaaatctcatgaatgtcagagaatagcaacagagggtgaaagtcatctgcccactgattctctctggagatgtcttcatgtcattgatagcagcaatggggagatcccagttggcacctgagccacagaagcatactcatgagatagtccctgaagcccttgctctagatacagtcctcctccacttggcaccccagcactccagccatggaggtatggttggcagtgaagttgctacccagacaggtaacaccagtgtcgatccacctggctaaggcctcctctgacacttatctccattgctctgagccttgcatgtaggttgtgatgtccacgaagcaatttgggttgtgcaccccgtggtcagttctccctggaattttgatccattgagattttctgaatggtctccgtctggtgtaaaaggaagcttctttgatgggagctacacttacctgtggatataggggtagatatttagaatgtagatggctattgcgaaggtttgtatatgcttggcccagggagtggcactattaggagctgtggccttgttgaagtaggtggaactctcagctcctcctgcaccatgcctatctggatgctgccatgttcatacttcgatgataatggactgaacctctgaacctgtaagccagccctaattaaatgttgtccttataagagttgtcttggtcatggtgcctgttcacagcagtaaaaccctaagagagctaggtatccagggccatcacaatctccctcctgtgtactgtacagtggcatgctgcatgtgagtatttattatctaagattacagatgttcatcaccttacagtggggtcacattctgtaaactctgctaaggtggaaatcccggaagttgtaatgcctgcagcatgccaggccaacagaacatctcagcttggccatgtaggatgttgtattccatcagtcgcttctcgtggctgacagaactgtggttcacagttgtatcataacctaggatcttgccacccatcactagctgggaaaaggttgaaatccaaagctcatagtttagcttctagtgagtgtgtgtcgccctcacaccagtgtaaggggaaagccacgtcaggttatcagatgttgggggtcatctgtgtagttgtagggagcagaacagagcttgccagattgtaggtggggggggtggatgagagtttgggatcaaaccctcccatactgactatgtaccgaagtatacaaaaaggtctcttcttagatgttacctttaagattgcaagtttaaaagaattctaacagcagtgttaccttactgtggtggtgcaaataaaaatggtcatcagaggcccatttatttggatgcttagtcacaaggcagtggaactcttgaatgagattagaaggattcagaagggtgaccatgttggaggaagtgtgtcactggaggtgggctttgaggttttttaaaaaacaaagaaacaaacaaacaaacaaaacacttacctgtgttgtttaagagtttctctctttcagcccgtggatcaggacgtagctctcagctattgctctaggatcacacctgtccccatattccccgccatgatgatgatggactaaacttctgaaactgtaagccagccccagttaaacgctttcttttataagagttgctgtggccatggtgtctcttcgtggcaatggaacattgactaggacacttacctagacagaggagactggacagagagagactacttcatctagaaacccctgaaactctcaggtttcagactgagagccccacggcaggtgttagggttgacaccagaaaataacagagacactggtgtggtctttgcagagtgcctctgcaatcctcctcgcgtcatgccgaatttctcctgccttttccaggtcttctcaccagtttctactctaatacccagcaccttgtctcagactcatccatacgttctgccaagatggctggatctcattttatggcttggaggatacccaaaactagttatacacatggaaatagcggtacaagggacagagtcaggtttggtctggatgggatgaggccaggctgctaaactgttacctaagctctctggtccagacatccatcgagcaagcccaagttgaaaccacagattcctccctcccttttgcagaaatactagtataccagtctgtagttcttctcatgcactgagctttatctggaatgtgggcaggttcttctctaaggccttggccagcagtgtggcacacctctggcagatggggcagattctggaaccctgcctcatatgacttcatgcattcttcaaagaaaccacgatggggaaactcggaggcaggaataccgtaagtcgccataaggaagctggagcatggccttcatgatgccagaggcagtggtatcaggctcagtggagatggctggaggtatggggctccaaccgggctagatcaccatagactcttcttccttcgcccttcctctgtctgtcaggcgtctgaaactccagaggtggctttatcaaccaaacatcatccatcactgattttctccacccagtggttgtggatatgtcattagacttcaccttccatggtcccatactcccaccacctccgtggctctggcaaggtctgtataccactctctggtcacacccacctccacaggtaccctttatgtttctgaactcttttaagcctgcctggtcctcttcccctgaaggcccttggagttaaggagtaaagacagtgatggtctgcactaaaggagtaggccaggataccgtcttgacggaaggatttttaggtttgagagaggggtacctcgggtggctggatcagcctgaaggtactggctctgggttggggtatccatgcagaaggcttgggagcacagccaggagcctttgctggttgttgtgggagcttggatagaatggattctcctcagaacattcttagtcactgtcagtagaggggtggcagaatgcagaggtatccacacaagagttctttagcgggaggtctggtggtcatgtcaaaagggtatgagcttgggagtggctgcgcatggccttcagcacctcctgatgttggcagattttctccaacagctgcttctgtttccttccctgtttgggagtcctttggactgtctccaagggggggtcctctctttctgctcagaggcctcaccctggtcctgcctgggatggtggttcctggagcaaacccaggtaccagggcaaacttatccatcagaactcagccagaagatgagagtcatccaccccagacacaatcgcaatgagcggcggtcagggtttccataaccctctggtatttgcattacagctcaccaggtgggtgctgcttcattccacttagccaagaagtagccagactcatcccagagcctgatgacttcatcccataatgcaccaggtgctaccccattgcctgaagcaggtcaccaactctccttggcatcagcaaaagcctgcttatgctgtgtgtgacgctctgaggccagataaggcacatcagagacctcaacaacctgccatgtgctatgctgttctccagctgtgagctctctttcttgtacatcttgatgaagtgactacagttggagtaaatgtgccttctaggtcctgatcttcaatatggacccctgaaacaaaatcagttcctctggcttttaggggttaatcacttggcccccttgactcttctcttgatattagcttttctgcacagggcaacagccacaacatcaccctggagttctgtgtgaggtctcccactcatacaaacttctaatgcctagctgggtgcctagtggctttttcttcatcaatctgtgacaacatttacattgctttcttccattcacatctgtcttggtcttgagatgacctaacaagtacttaaacaatgtagacaaacgtagtactagtctaatgtaaagaccaccctggtctttacattataactgtgggtgtgtctgagatctgaagacctgtctcaggcctggcaataggcacgggagtgctagtctggcttagtgccctctgtaaaggtcttggccatctggatatcttttggattggaggctccgttctgtgttatccataagcctaaatttaaaaataatcagcagtgttctctggaacagaaatctcttcgtcctgtcagccagcccagtgttgctgccacaccgcttgtggccctggaagccctagattctcgggctgtggaatcaaaagctaatcgctgctattttcaggaagcctcatgacttcttcctcagtgtatgagactgaatgtttaaagatgaactttgcctcggcggctaacgcctctgacgggttcctgtgtccgaacattccaggtaggcaatgggactgacttcatcaataccttcttcttcatggctaatctgaaatggggagaagctgggcatggtgtttcccttcttggtgaagatggtaaaaatccttcccagtatgcattgaacctgaatttaaagccattcctgtactgcccaagctgggtagactcaggtgtacatttgcctggattcccaaacacgggcaacaaccaggacatactcaactctcccataaatataaatctgccttggagtcacatgtgaaaccttgtttaccttttcgcctcttcctcattgcgcgacagggtgatgatatttcctgtttcgaagtgctacagtctggggagcccttttctctttcatctcagaagcttaagaggactcttgccttgttaccacaaaatgcctggcagtagagtctttaagaaaagggtccttttgcttatgctccccgaagtctgagggcatgatggtaacattggcttccagtaaggactttatggtagggtgagtgagtgagttcacatgaaagagaagggggaggggcgggaaagcagaggggagagagagacagagagatatgatgatgagagagcaagacatgaaacaagagtaaattaagaaaacaaacttgcttcctaacaacctacttagtcttaatcttttcccagggtgaaaaactaatagtctcttattagtccccacctcctcagagtgccaccacctctccaaactatcatatcaaggctcttgttattaagtgttctcaatccggagctcaggacgagcgaagcgttcgttgccttggttcctctggctcgttgccaaggcaggacccagcagttctgaagggaccttgagcctctgactggaaacagaccccttgctatttgtgtctccatttccatgtctaaggagccacagtgtgactggccactgactttcagggcagggaaagaccatcctaactgtttgaaggagatcagggaaatgctagctgaacaccaacaccaatcatattgaccgcagcaacggaaaggctactccttgaggccctggggctggcgtccgactctgttctccattttctatgctgtcctgtctctaaggggaaaagacttgtgagacgctgttttctgtagagtgtgggtttcattcctgtggtatgaatgaaaactaagccatcagcattagtcacacttgactctgggctcccagaatactgggtatgtggcttcttagaagatgatgccacgtgacttggggaagctacagcaaggggcaggagtgatgtctaagccagcctgcattgcagctgtcccactgtgtaatggtgataagtcacatggtctctttcagtgctttggcttcttcacctggaaaacatataagaatggtacctacctcataggaccattgaaaggatgagaaaagcaacatggccgggtgccacttactgacagaaacagactcccagaaatgaattatatggtgatttctgtctctgcaagcatcatagactataccatacaaactcagatgacatgtcctactgcacacccaggctagtgttggaggggggggggctgcctgtctgtgtatctgtgtgtatgtgtgtatgtgtgtgtgtagtatatttctgtgtgtgtctgtgtgtatgaatgtgtttgtgcatgtatctgtgcatgcgtgtgtgtgtgtgtgtgtgtgtgtgtgtgtgtgtgatattctactacccttgggactacaataaacaaaaaatatgaggtggaatcaagcacaggagaaaatgatgtcatcaagaaactccacagagtgtgaagctgttgctactgacgtaacatgtgcactgttgtctgtcagcacactcagtagtgggggtgtgagcctccatgatcatttacaatgtagtgagtacacaagccgatgacatcgccaattatggttttcaccagtattagttcctacacatggttatatgtgctgtgcttgtagatgattgagtgctcagtaggtgtgttaacaccagtgcacagtaggtgtgtcaacaaccagtgttgtcatactcacacgagtaatgcattgaactgtgatgtaagatcaaagcaaccatgattttcctactctgttaagctcttacgtgcccacgttgagtgtgtctattgttcatggaaacattatgcagcatgcagctgtatgtaaggaactacatagaacctcctagtcagtatcctgcagatgaggcctaggcaaccttactcaaactccccaagatgtccgatggacattttacaaaaggtatcctgggagctgcattcaaaaatcaaagactgcggttcctaaggatgtgtgttaacacagagacctgtgctgtgtcctcctatctgctgtctcctctctgtctgtctctctctcacacacacactctctttctctggatccctctacccatcccacccccagtaagatgacacaattgtttataaaggcagaattgaataaacgccctcctaaagaagacacatgaatgacataaagcatacagaaagatgttcagtgtcaccagaaaaaggcaaacacaagccacaatcaaatcatccaacagtggtagaaacttgacactcccaagtattggcaaagatgggggcaagcgggaatctcatctgttcccgatagagatgggaaacagctggagccaacttcacgtggcaatattgtggtgtctcggttaacgcatgtctaccaagtgactcagcagctctgtgcttctgcattggcccaagagagtgaatcttaaagtcttgtatgtttctgctacattggggtgtggggctaggggacgtgtgtgtgtgtgtgtgtgtgtgtgtgtgtgtgtgtgtgtgtgtgtgtgtgtgtgtctgtgtgtgtgtgtgtttgcttgtccacccgtctgcctgcctgcctgcctgcctgcctgcctgcctgtctgggattattttgttttggtgttttgctatgaaacccaggctggcctgaaacttatccatctgagtgtcccgagtactggcattacagatgcacactgctatgcccagacagtgttctttgattattattttattattattattgtgtgatgatttttatatgcttggcctagggagcagcactattagatgtggccctgttggagtaggtgtggccttgttggagtaggtatgtcattgtaggtgtgacctttaagaccctcgtcctagcagcctggaagtgagtgttccactagcatccttcagatgaagatgtaaaactctcagctcctcctgcaccatgcctgcctggatgctaccatgttcataccttgatgataatggactgaacctctgaaactgtaagccagccccaattaaatgttgtccttataagagtttccttggccatggtgtctgctcacagcagtaaaacgctaagacggattgcatgtattattacagcatactatgtgagtatgtacatgcatgaggccagaggacagcttgtgggagtcagctcttccactccatcatatgggtcttgggaatcaacctcggcttaccaggcttggcagcaaggtctttactcactgagccacctccctactcccagttcataattcacccaaactggagatatccgaaaggtgatatggctatacaatggaatacctgtgagctgaaggtagaactgtcaatctgcacgccgatgtggtgaagtctcaaaagctgttgcaaatgaaggtccaagacttttagaattccatttatgggaaattcaagaaaatgccaaactgagtggctgcgcttgggagaaaacaaaaacaagaggcttggaaaaatcccctaagacgaagctgctgtctctcttgtgttggtttcagtcaacaattataaaaagtcaccaaacagcgtactttaaatgcatatatttcatggcatgcaaatgtgatgcctttcaaaattccagaggccaagtgtcccggtgtcatccgacctgttgttccagattcttagcatgagcggtgctcattactggaaacaaggtcatcccaggctcttggctttctctcgcctcagagctgcagatccagctgacattgaccgatttccagggtgcaccacagtgcatcccaggcggaggccaacggaaacaagcttgtgttcctgtcactaatgataagagcctctatcggatccttcgccaggccacgctcatcgtcattacacccattgaagacaagagcggagcaatgacgagccgagtgttatcggctcgcaaatcatttataacagcaaactaggacaagagcagggctttttttggctgaggaggttgtgtgtcactctttaaaatctaggctaaaaaatgatttataatacagagtcagccagtcagaaaatgaaaagcattccttttttctatctcatgcatttgaacactgggccttttaccctgagctagcagtgaaggggcctccatatctcagtctgtgacaagaagaaaagtgtggcctggtcagaaatgagacctctacgggaatcccttaatccaaaacccaagagcaggagagaaggagggaggcgttggaagaacaaaaggtctcttagaaaagctgaggagattgtgcagtggagatgagcttcggagaattgcttagatctggtcagggaataaccctaccagagacagaaccagggtaactggtctatgagtggctgttgatgtgttgtagatacttgaagcaaacagcaactgtggtggtgtctatgtagggtgtgttcttttgtttctgggggactacttgggggaacgttggtactgataacttgtacagttgaatacctgccccaagagaggtaagccactgtccaccagaaacttctgtcctggccacacactgaccaatcaatagcctaggaactgtgactctccaggtgcctggaccagcaggcagaccatgtgtacatggtttctgtgcccatcagctggctctctgtaaaaagttcattgtgggtatacttgggaggagggatagggcagctttcctggccatgggtcaccccagaataggttgctggcagttttctattccttttatgtgcatggctattgatcacgcatatctctgtgcactgctaaagttcctagtacccacagaggccaggagagggtatcagatctcctgggactggagttacaactggttgtgagttgctgtgtaggtgctggaaatccaaactggatgcactggaagaagagccagtgctctgaagtgttgagccttctctctagtgccacactggattgctgatgaagggactctcggatgtcaccgggatcaaggctccatagctgggctgcttcctgagaatttgcggggtgcatctctctatcacgtgttccttattcctcttgttaggccagtgccaatgaccagatcccctcttctaatcccttcaaagtctgagaatcctcaaaggtcccaacctgagcagcctagctctcatctcttctacagacagccagtgtggaatgtccttatgaaagtaggcttcatcttggagagcaatttaaggatcacagaatacctgagtgagagatatgaagatttcccttacagttcctgtcccgcatacacacagatctccctgctgtacgtgacccacttagtgatatgcccatcagttacagttgatgagactccttggcatgtcatgatctcctctgttaacattgtggttccctcttggtgttgcatatggcagaagtgtgtggcatgtgcctgccatgctggactcagccacagtgatgtcactgccctcaatactctctgtgctgtgcccatacatccctttctatgagccatggtgacccatggttgctttaccatttctgtagcttctccttttccagaatgtcatatagttggggttcacacagtaccaggctatagcacactggtttcttcaacttagtgatgtacctctgagttactctcctgtcttgttgagtagtgagtgttctgtttttccgtgctcacagctgcctgacaaataggacagcatcagtgtctgtcatatgtcaccctagatctgcacggctcacaggttgtgctgagacatcgtcacctcactcacaggatgatggctcttggggcaagggccaggacatatgtatgactgagtggcacagccaggaacccccaccacgccgcatgggtggcataaggctgaatgccctggactggaggaaatagggttgaagcctcaccagggactctgaggataaatctaggtaaacagcgtgcaattttcttcctggagcttaaagctctacaaagttagagaggcggtgtctggcaatggcgctaagctatgtaaggttttgtatgtgagtcagaccttgcttattattaatgctgtctgtctctgtggccaaaagtctagcaaaacatgtttcttgccccattactcagctccaaaatgtggccaacgttacctccacgagagactttttggatctggtgctctccgtagaaaacaccctgagagagaaggaacctctgcggcatgacaaagccttcgtgacgtggagtgttctagttaacctgtgccttgtgtgttcccagagcctctcgaaataagtctgagaagaagcgtcgggaccagttcaatgttctcatcaaagagctcagctccatgctccctggtaacactcggaaaatggacaaaaccaccgtgctggagaaggtcatcggattcttgcagaaacacaatggtaaaggccgtgcgctcgtgcttcttggcatctctgtcccgccctacccttcctgcaggtgatgagtccatcaggcaggcaatccccatgagcccaccattaggaaggtcaccctcatccctcatgggctctcctccaaaggctctggacatgccccaaaagccccatgcctagcaggttggggggaagacagctattccccaaaaatgctttatcagccttaggagggcctcaagagcccacagcctgcacaagtggcattcaccatgagtttgtcattgtcataatcccctggaactcatccaggacctgcccctctctgtctttccccaaatgtgacatctgttctgactacacacttgaagctgtgtgtccatggggattttagtcagctgaaatcatgcaggtcactcatggccctcctcccctgtcactggcagattctgtcctgtcacttgacattaccacgtgacgctatccaggaatgcatgtcttccgcagactgtattcctccccaccccccacccccccccccggtgctttttttccctgtatgcagatctcacacttagggtgccactggctttgaacagtatccaagtgcaacagtgacaaaaataaatagtctggggaagggcaggagagatagctcagtggttaagagcactgactgcttttccagaggttctgagttcaatttccagcaactacatggtggcttgcaaccataataggatccgatgccctcttcccgtgtgtctgaagacagctacagtatactcatatacataaaataaataactaaatctttttttttaagagtctggggaagaccacacaagcagagttgcaatagtcatcactgtgatcatttaatcagagtgcttttatttcctaagtaacgttttagccaagtgaaatagcaggtggtttgattgccaagatattttgtgcaaaattactcaaactaggtcagtgccacagaagcaggacagctgttaaatagggcagctggaatcaagttcatcggcctgacatttatgttgctcttggtccactgtggagttaccaaattctctaatctggcccaggaaggccagatccacagcactgctgcttcctgacaccaggagcacctacctctccagccttcccttttcacaagccgaggaggcctgccttcctgccttcctgctttcctgccccacctgcctacatacagtcagagtatctgcagactcacacaggtttctgagaatccccatttggaagaaggggaaagctccatagcaaatttcatgcagaaaatttcattttgatgcttgcaccaaaatgtggcttaaagcaaatatatatatatatatatatatatatatatattaaaaaacaatatagccactttacatgtctcccgagtactgtgaaccccacaggcgcgggcaacagagtggaatggtgagttgctttctgcgttactgcagggttcccagaaagccaccattcctgtcattgcctctagacttcacaacagcaccttactcagagtcctgtggggtagaaacttgggaggttaatcaacctgaatcagacagccaggaaggcattgactttaaatccagcagcctgtctatggagccctgatcttaagtcaccttctactgttctctcagtcatgtaatggatggggctccatggatctgtcatggctgcactgtagctctgagttagtgtatccactcagactattgcttctcagccttggctgcccatgagaaccacctaaggagctaggataaaaccactccatggatggatataccagaatctttgggagtggctccccaaaagtgtgctagagtctgtttatgccagctcaaaaaaaaagagtcctaatttgtcagtgtatgcacttatgcatgtgtgcatatgtgtgcaggcatgcatgtgtgtgtgcatgtatgtgcatcatgtataggccagagaacaatctcaggtctcattattcagattctttgcatcttttttgcagacagagtccctcagtggcctggaacttgccaagtaagctaggcaggctgagcaataaagcctagggatggatctgggcctggctccccagtgctgggatcacaaacacacaccatcatgcccaatttgtgtgtgtgtgtgtgtgtgtgtgtgtgtgtgtgtgtgtgtgtgtgtgtgtatgaatactgagggtaaaactctggtccttgtacttgtacagtgagaataagttagagttagagtgagaacaagttggttagagtttctgttgctatgacaaagcaccatcacataaaagcaagtcgggcaagaaagattttacgcttccacaacattgttcatcattgaaggaagtctggacannnnnnnnnnnnnnnnnnnnnnnnnnnnnnnnnnnnnnnnnnnnnnnnnnnnnnnnnnnnnnnnnnnnnnnnnnnnnnnnnnnnnnnnnnnnnnnnnnnnnnnnnnnnnnnnnnnnnnnnnnnnnnnnnnnnnnnnnnnnnnnnnnnnnnnnnnnnnnnnnnnnnnnnnntgctgcttactggcttgctcctcatggcttgctcagcctactttcttaaagaacccagggatagaaccacccacagtggtctgataactcccttatcaatcactcagggaacctcagttgagaaaataccttcatgagatctgactgtaaagcattttcttcactagtgattgataggtggtggacagcccattgttcatagagccatccccgggctggtggtcctgtgtactataagaaagcaggctgagtaggccaatgttgagcagcatccctccatggcctctgcatcagttcccacctccaggtttctgccctgcttgagttcctttcctgacctccttcagtgatgaacaatgatatggaagtacaagccaactaaaccctttcctccgagcttgctttgtgatgatggtgtttcatcacaacaatagaaaccctaactaagacagttaaaataaatgttggacagtgcagttttgtctaacaataacagcagcatgtccttccagactcttccacgaagagcttgagggattgaggggatgagtctgtctcatgcttaactcatgtgcttcacatcctctttcttcacttgtaaccacataccactgagtctattcagactcactcaaatacaggattctccctctcnnnnnnnnnnnnnnnnnnnnnnnnnnnnnnnnnnnnnnnnnnnnnnnnnnnnnnnnnnnnnnnnnnnnnnnnnnnnnnnnnnnnnnattgccaaaaaccatgggcataggacttggagtgttgattattggcagtgattgtctggcatgtgtgggaccctgggtttaaggtttagcacttaaaataaaggatgatgggaagaaagccttgaaatctgttccaaatacagtgggcagtttctctgtctgaacgacttgctcccttctgcaagttgttcaatagacttagtttggtggtggtggtggtggtggtgatggtggtggtttttttgttttgttttgttttgggtttttttttggggggggggggtgtttcaagacagggtttctctgtgcagtcctggctgtcctggaactcactctgtagaccaggctggcctcaaactcagaaatccacctgcctctgcctcccaagtgctgggattaaaggtatacgccaccactgcccggctcagacttagttttattctctgaggtataaatggtatattcttaaatttttaacataggtaggggaaatgttggtttaagatagaggataggggctggagagatggctcgatggttaagagcactgactacttttccagaaggtcctgagtttaattctcagcaaccacatggtggctcacaaccatctgtaatgggatctgatgccctcttctggtgtgtctgaagacagctacagtgtactcatataaataaatttttgaaagtgatagagggtaaataagaaaaaaaaagacatgctatcatgtttacagtgtctatggtaacactgaggtaatttaataataaaacaaaattgctaagtgcagagaggatattttaagagtcccgcgtaggtcagtgaccactcgattgtcagatgtgagtgatatcctaatgtcatgattatgacagagaacaggtaaacgacagattaataaggacaaccaccaaagtcttaagaaaagcaaattcagatcttgaaagcagctcaggggactcggggagcagaagtaaagtagtccagcgcctccctagcaggtaagaggcgatgctgagtgtccctgtagctgttgtttctcagaacgattgagagggtgggaactgaactcccaccagcatggaacagtgggcctgtttactgtgagcctaaggcatttctggaagttgctgttgttactgctgctgttgctgttgttgtttggaagtgctgggaatagaacccaggatgacacacagaggtaggaagctcacaccctctacctgtgagctctaccgccccgcccttggaattttgagaatcctagattcctgaagtgttttcaccttgctttaaccttgtaacttgaggagatactaacaggccagtctttgttcttcccttgtgggtgctgctgcctggttctagctgtttttgctttgccccgagagagtctgggcagtgggctgtcctctccatatgctcacaatgggatggtctcttctctgcaccctccttaaaggctacaacagcatcaaaagtgtttttcagcctatcatacccacagtcctcggagttggaaatcaaggagagcatgtcccacagtcctcggagttggaaatcaaggagagcttgtcccacagtcctcggagttggaaatcaaggagagcttgtcccttgctttccttaattaaagatttacacaaaataattccagatctgaggttccctgaattccagatctgaggtaccctgaatatgaaaccttatgtatacttttctcctgtttctcgtttgtttgttttttagaagtctcagcacaaacagaaatctgtgacatccagcaggactggaagccatcattcctcagtaacgaagaattcacccagctgatgttggaggtaaggcgcacttcttcaagttagattaaggctggggtgtagtggggaatgaattggcggggcatgtagcaagcatacacagcgctctgggttcagatccccagcaccacatgaaaccaggcatggtggctgaggctgaagaatcagaagttcaaggccatactctgctacatagcaagttttagacccacccacgagatgcatggccttgtctgaaaaaaagcagcaacagcaaacgaaaacaaagaacaaaaaaaggaaatagttcagtcagtaaagcgcttgcctcataggcatgaggacttgatgtagtccccagaacccacatttttaagaaagcatgcatagtgacacacattcctaagtccagcacttgagagaagagacgggcagatctgtgggaccagctgcctagtcagccagcctcatctatgttgtaagccctgggacaaaagagaaaccctgtctcaaaccaaaaatcaaaatgggtagcttcacacacatggacatgtgatcatacacatgcacatatatttacacacagaagtaaacatccactcacacatgaatatgtatgtactcacaggtgcagacacacatatgcacttgaacatgcaatcacatacatagacattcacatatagccacccacacatgttcttaatagattaaagggtttagtaagttagaaattaaaatgtaaccatgtattcctgttagctctcatgcccaaggaaagcagctgttcatggccctggaaatcagccccaggacagatgccagcctgtgttctgcctgctatagtttatactttgactactgagtagggctacctgagcaagaattcccaagctggatccgctgcctcagtgactataggacaggccccattagtgacctcccaaaaagggcatagaacatgaaccaggggtcagtggcggcagttgtgggagatgaggaatagaagatcatggcagactgaagcccctctttagaatgcagaggttgcaatattttctctttagtagatgcacattaggaagcaggtctttgaacattacactttaggcctgagctcactgtacataaacgttatgcaggtgtcagccacagtgacctgtgccttccacactgaccccaccctttctgtgctatgatggttgagttccttctcctgcagcactgagctgaggggtgtggggagagagaggctgatgatgagctaataacctccatcggtatccttggaacatttgcctatgggtgtaagtcctcaggacagaccacatctctacaaaagccctagtgggtactctgaccccagacttgagtttactgcaggagtttgcctacccccatgaagactgaccagtcagatgtgacttgacagaaaagtccaacaaagggaagcttatcctgccatgtgaccatgacgtctggctcccagctgaggcttccgagggtagcttcctaggataagtctttctatagctcatctgggtgcctatataagactgatgtaaacttcaatttccatagattaactatgcagaaaacagaaagtactggaataagaaaatgccagaataaagatgtctaaatattatgaaacataaatgcattaatgaacatttgcagcagatgaaagctacttaactctacatgggaactatatttaaagaaaatacagaactttctgcagaagcaatgtattttaagtatgttaaatttaaagcagcttatgaaatataatgttaatttgttgcatcattatgccgccttacaggcatcagtttgtcttttaattccatgagaaaggagttaaaaacatataaccctctggaaccagccactttttaagagcttgctagcacaacctgttttgctttatccagtgagtttcaacgtatctaaaggattttactggccgggcgtggtggcacacgcctttaatccaagcatttgggaggcagaggcaggtggatttctgatttcaaggccagcctgctctacagagtgagttctaggacagccaaggctacacagagaaaccctgtctcgaaaaaataaataaacaaacaaataaataaataaataaataaagaattttatagtataaggtttctatgaagttttaaacatgttgataactttatggcttggatctggaaccaccctgtccgttcagccctggacaaccaaaggcagctgggagctgaaaggctactggctagtgcttggctctggctatgctaagcttgtctcccagcctgttgcccttcagtagacacagcctgggaatgagtcagcagtaccttctgctttctccccttcgtggtccaaaccccacaatgtggccccttggatgacttatagttttcacagcgcaacttattcctagtgtttgttccatccctgttgggcatcctcctcttttggagagcatgcctttgatggtttgtatatgctcagcccagggtgtggcactattaggagatgtggccttgtttgaataggtgtaggcatgggctataagaacctcagcctagccacctggaaaccagtattctgctaacagccttcagatcaaaatgtagaactctcagctcctcttgcaccatgcctgcctagatgctgccatcctcccaccttgatgatgatggactgaacctctgaaactgtaagccagacccaattaaatattgtcctttataagacttgccttggtcatggtgtctgttcacagcagtaaaaccctaagacaatgcccttccaggattggtaagccaccatctgggtactgagaaccaaacccaggttctctgcaagaacaagtgctttaacctgctgcgctatctccccagtcccataagggaggggaagctcttgctggccagagtttggggaattaaaggtcttcctgcatgcttttcaggaagcttcagaagtcttttctcttaaccctcgcactgtcccagagaacacaaagaatattccatcaaaattaggagtgtgtaggtagggaggtcttgtatctctgtaatatgcagtgaggggaagcatcaaggacttgtagaaatcccctccctctatggatagggtgtgtagcggttctgtcgcatcccacacagtgggatttccagagccatggcaaggattgctgacacagactcaatttgggtcttatatgctttggaatattcccagggagcaagggaagggcatctcacaccaatgagtaccttcagttttgtgacacccacatgcttgacagacctaagaaggacatgggctcactgtacaaaaacaaacgaataaataggaaggaaggaaggaaggaaggaaggaaggaaggaaggaaggaataaaaaagagcaggttgttcaacttctactttccctagccttccactgtttccaaagaggcccctctgacatcatgaggctgcccctgcagcttagagacattcatctacaagagggctgcagagagcctgggggaaagtgggaagagcaaaggctggagagaggagggcttgggatgaagcaagactgctgggtaggtcctaattcacagccagctagaagcaagaagtcctggggtactatagcaccatagggtgactgccgtacaatagtgtgctgtgggttacaagaagtggatagaaagatttcaaacgtcttcatcataaggagatgataaaggttttagaggcagatatctctaacctgacttaaatattacattccctacacacataccaaatatgccatggtacaccagggacaggtacaattttatgtttttatataccagttaaaataaagctagttcaggactgcggctgtagctcagtcacatgacccaaaccgtggagttgaggttgcattgacaaaataaattgaaaatttaaaaagaaaaacgatttagaagaatagttggggggctaaagtcaccagactttgctctttttttttttcaccatgactcacaaatctaacccaagagcatttcagtgtcagagcggcaggcatcgcacacttaatcattctttgatgccctgtatgttgtgggatatttttcatcatcccctgcctctactcactagatactattgtcaaactccagcagtaacagccccaaatgtccacagacattgccagacatcccaaggttgagacccactgaggtaactcgaaaggatgtgattcgcttaagagatgcactgtgcatttgtgaaacacatgaaactcaagaagaatgaagaccaaagtttggacactttgccccttcttagaattgggaacaaaacacctatgaaaggagttacagagacaaagtttggagctgagatgaaaggatggaccatctagagactgccatatccggagatccatcccataatcagcttccaaacgctgacaccattgcatacactagcaagattttgctgaaaggacccagatatagctgtctcttgtgagactatgccggggcctagcaaacacagaagtggatgctcacagtcagctattggatggatcacagggcccccaatggaggagctagagaaagtacccaaggagctggggggatctgcaaccctataggtggatcaacaacattatgaactaaccagtaccccccggagctcgtgtctctagctgcatatgaatcagaagatggcctagtaggccatcagttgaaagagaggcccattggtcgtgcaaactttatatgcctcagtacaggggaacgccagggccaagaagtgggagtgggtggggggagggagggggtaggggagtgtgtgggggccttttgggatagcattggaaacgtaaatgaaataaatacctaatttaaaaaaagagatgcactgtacaaaaaccaactcaatgtgaaacaaagacctttggaaagacctgtaacactcgagggaaagtctcgtgatagaggcagaggcaagaactcctgaaaacacagcaccagcatcagaaacatctttaagcactcgtaagtgagacgacatagcacttaaagcctctgcaggctgaagaagctatctgcaaagagaacacagaacctaccagatgggcaaagactcccatcagctgtccctcaggcaggaggttaaagtctagaatatataaagaactacagaaatcaaacaccaaaaaaataaaaaataaaaaaagccctccaatcaacagacagttttcaaaagaagaaacacgactggccaataaatatttcttaaggccttagccatcagggaaacgcaaactacaacttctttaagattctgtctcaccctactcagaatggctttacatcaataaaacaaatgatggaggcaggggtgggggtaaagaggtggtcatgtaactcacatcctgcataccagacgagcctcctgtgtccaccgaacttcatcttactgtcaccacatgcaaactcaaggcccaggccagcctgttatgtccacactagacataatcaataaaagaaaccagcatgcccaggtctcattccaaaaacacaaagagtgtaaaagatgaagacagtaagtcctacctcaagtccaaccaatcctctacagtaacctccgatgagaatctccaatgtgaacccggagcctgcaggatttgaaaactgaattcaataaagagaaacatcgaagggaggtaaagctgaaacgaagacggaacagaaaaacctggcaacccaataagaagctcacgggaaagtcccgcaagtagaacggatcaaagagaagacagaatatctgaacttgaagatagaggaatcacagcacatgagcaaagatatggggggagttaaaacacaggaaaggaatgcatgaggaatgagggacaccgtggaaaaccaaaccttttgattacaggcagaaggaaactttccaaaagtaaggaaagacatacccatacagatacgcacagagtgcaaaacaagaaaggccagaaaagaaaatccctgtggcatatcatacttaaaccactaaatacagagcaaagagccctgaaaggggcaagggaaaatacagccacagccacacttggtgcactgtcctggcctctgctgtcccacacttaggcacaccctcctgactgcacggaaggaatacccctttatgggagtagattctcagcagcgccttcataggatctaggaaaagggcgtgtagaatgtttccagaaccttcgaagctctgcttcgccccctccgcaaaatgagaaacagatttagaaaagatgctgtttcaaagacgtggtcggtgcgacagcagtggcaagcttcccgtggacatccaccggagcctaggtagcgttccctcaaagatttatgttctagtgagacgagccctgtttccattcactccgtctcaccagactccccgatagccagttgccggtgtgaccccttctttgctgaatgacgtccataggcgtagttttagaaatcaactttgagttgttgaaagcattataaacacccacaattgaatctcaatacatttaaaaactgaacctctaccctgtgaaagagtgcagtctacagctatctactcacagccaaggaagggcacctaccgcacagtataggcgcttttgcatgcatgcaatttttagacatttggaaacccctgtgcccaggggagttagttacaaagcccccactcccgcccagccttgaagaacacagtgaatgttccttttggagcgggtaggggtcagaaacaagtttccctatcctggccacctcagcctcccaagtgctaggattacagcctaatagcaccgcagtgccctatgtaaataggagtaaagtatagctagaagggactgaatgtgtgagctaagaacttcacactcttcgcccgtgtgctgattcctctatcttcaatgtgacaatggatgtggaccatggatgagatgtggatgtctgtcacatccagccaggctccagcgatggacctgactgggccagcaaaggaatgaggaaaagacacaagagacatgcggagagaaaaactgggattgggtggaccggactctctgatggagaagccgtagcaccccgttttattatacagttgagtgggggtgggattattgcacacagctgaacaaagaggcaagtttagctaatcttggtaggagcagtctctgtaggggagctgtcttcaagccttgaacacccattcagagtggggctgtggctgcagcggacattttctacatgtactatctgtgcatggatgagaggggaggctttgcctatctctgccaactgcacatgctcactcaggccctcgctcactcaggaattcctccccttcccacagaggtctgctttggccttcgggcatatgtttctctttgtaaggcatctctttctctataccttgcagtaaacgtttactcctgggttcacagtgatctcgggtggggtggggtggggcaggggctggggactgtagcacgcatgctgctggtgcctttgagtggtaatgattggtctttctgattcatctcagttgtgcgactgccattaaacctacgtaagcagtttctacggctgcatttctttttatgattccaacaggtcagctttaccactgagcccacagcgcttttttcttgcctgagctgaacagattgtgtgcagagtcagcccgtgtgtgaggcagggaagcgctgtgaggttattcatggagatggtctgaagattacaaaacaaagtcagcatcacatgggaaaaaaaaatgaatccttcgctttagtgtcatgctccttcataaaattgtccctaagcagctctcaaatgttgcatttccccaggcattagatggcttcgtcatcgtcgtgacaacagacggcagcatcatctatgtgtccgacagtatcacacctctccttggacatttaccggtgagtttctgctccagcggccttggcctgtgcatgatttaatatttcctggacaggcatgcaggagtgctgcaggtatgggggagctacgtgtgaggaggaggtacatggaggcttaaagagtgtccaagttctgcagaaccaaaccaacccaaggtcaaggtcctgcggcagatgaaaggcaggagaaggcatatatcaccctgaaacaggcatggagctgtgatctcaatgggtccagggccaaagtcaggatgggactcccatgagtttctcagtgctgttagcagagctcagagggcagcagatgttcctggtcaactgagagttgataaaggaaggggaaacagatggcccatgcagaatatggtttggagctcacgggagagatgtatgagattgcaagtaagttataacaccaatcacactgagcgcttctcagccgccatgtttcatggcagttgaaacattgtagcaagacacagttggatcagtattgtgagggccttggggaataagtaggtactgcccaggtggggagaagagggccagatctgtgcccctggggtgagggtgggaccctctgttcctcctccccgacttcatccttttttcctgcctttttcctccctcctctctataagctttgatagctccctagtaacagtagttcagcatgaagtcacttgcaggtctacaccaggctagaagaaggcccacccttaaggaaaactcaagcctttgcccagcgacccatttcttgcctcgccattattggctcccacagaacttggccaggaaggacagaaccactaggagtgatgcttattagtggcggataaacaccctctcttcttggtcctccgagtcagtctggcagaaccaaccaccccactcccaacccttgcgatcaaaaggttaggcttccagtttatgtgacaagaaaggtagcagcttgccctggattaagccaagggaaatcctgggtcagcatgatgctagaaaactgtggccctttcttcatagctgtgccaggtcaggaggcagcatgaccttactccaccagcagcttctgtctgtcttgtggtgaaaagccccactctgctggtggctcagggtttcttctacaccgtcctggcctattagttccttggaaggacatctcccagcccattgcttttgaagatggtctgtattcctacagaactatcactgcttgagttcttctgctgttccagcatcttaggtctgaaaggcacttttgacctttccgggtgggtaccttcccactgcatcatgggaatcattgttccctgaggccagggtgggacaggcatgtgggtgtctcttcttgagacagctgttggaagaggtttcttctggtcgtaaagggtgccaaggtgtacccacaccttgctctttgtctcagtgcggaggatggtgctgatgcagaagtgaccacgctttcttcccatggcttcctggggctcatctaaggataactgaggagagagggggagatgaggtgtctctttgggaagagcttctgttttgctttgagtggaaaagagtgcgcagcaatgggccctaaccaaaaccgaccaagagtgacctgctttctggctgggaaggagggacagagtccagagctgtttgggtaaactctcttctgctttacgctcccatgagtatctgatgacccagttgctatatgtggcagagggaacttaggaagtaattttcctggctcgaaattttggagccattcgggtccaccttgcgaaatcatgttctaactggaaggacccgggatggcttcaccctcacttggtcgtgccagacccttgtgtgtgtggttactaggtgaccacctgtagactagactcacaccttgacacacacacagcaaggccccagtagggctaagccccctggatgggtggtctgaaagagttatggttagcttctggtctctggctttccaggggtggacaagagggtttttttgtttttgtttttgtttttgttttttttttaattaggtattttcctcatttacatttccaatgctatcccaaaagtcccccatacccctcccccccactcccctacccacccactcccactttttggccctgacgttcccctgtactggggcatataaagtttgcaagtctaatgggcctctctttccagtgatggccgactaggccatcttttgatacatatgcagctagagtcaagagctcaggggtactggttagttcataatgttgttccacctatagggttgcagatccctttagcttcttgggtactttctctagcttggacaagaggttttaagagcaggaattttgctagttccatgagcatttagctatttcttctggaaatcattccctactgcttccaactttcagctgaggaaagccgcccagggcagtgagggcagcacaggggtggaaacaggtgctcctatgttgaacccaagacagccaccaggggcccagccaatgagggcagaacagggacgaaacaggtgctcctatgttgaacccacttcactccagtgtgttcctggtgctaaggttttaggttgcagcttgggaattcttttgtttgtctttaatttccctactttctggcaagaggcctggatctgtctgcagagtgttcgatgtttgcagaggccctgtggtggtggcctttcttcagggtttcagtctgagaacttccacctgttcaactgtcaggagcacacacttactgagcacccacttgctgtatgctaagtattgatatctgtcaagcatttgcaacggtctcttgctatccttactgatccttacattaatgccatgaaggtcaatacccctgagcacagatgagaaaaaccacagtacaaaaaagtcaagtatagacgaagagtatgcaggcatccaggggtgggactgtaggcgtaaactgggatgatagctccagaaagtcagaggtgtgactgtggtgtgaactagagtggtggctcctgaaagtcagaggtttgactgtggtgtgaatggctccaggcagccagggatgtaactgtggtgtgaactgggagtcatggctccaggcagccaggggtgtgattgtggtgtgaactagggtgatggtttcagacagccaggggtgtgactgtggtatgaaccgggtagccatggcttcaagacagccagaggtttgactgtgatatgaactgggtaatgactccagagccaggtgtttagccactactcagaactccccagaggacaggctgtggtgagtgtcattcttcagagttggacattgagaagaagcatggctggctggggacaaccaggtcaagggacaggaaaccagaggtcccaacagcagagccctgccatgccaaggttgaatcccagagtcacctctgtggctgagatgaagaaaaatccatcagaattctgcccaagagccagtgagcttaaagctctgtttcctgcttcttcatgagataaagttcctgatatattttcatacagcaatttcctgatgaaacatcaaacttatcgtggcagaggaaaaaagaaggaaggaaggaaggaaggaaggaaggaaggaaggaaggaaggaaggaaggaaggatttagatgaatgttttagtggtgttgatatcaaaatacttggcctttcttgatgtctagaatgaacacaggctatcgaagcagagatggaagggtgtgtgcatgtgtgtgtgtctatgtgtgtttctgtgtgtgcgtgtgtgtgtcctgtgtgtggtgtgttatgcatgtgcgtgcatctgtgtgtatgtctgtgtgtgtgcatgtaagtgcatgtgcgtgtctttgtgtgtctatgtgggtctgtggtgtgtgcatgtgcgtgtgtgtgtctatgtgtctctctgtgtgtggatgtgcatgtgtgtgcctatgtgtgtcagggtgtatgtggtatgtgtgtttgcgtgtgtgtctgtgtgtgtacacatgcacacatttctgggaacccaggtctactggtagcttctgtggtggaatggcagacgttcaggagggttgttgctgggaaagcaactgaggttagcagctagaacagacctgagaccacagcaggtccatctgctgctctctcgccgtgtcccacctctgcctggagacaactgtcttcctaagtttgaaaataactgcttgcttgttcttctttgcagttttattaatgctgaattgttcactgacctattattttgtagaggttaagaatttcataccctaaatgttcggaacagtgttttgatgttggatatctcccttcccctgccaacatttttgttcatttgcatgaattgccttatgcctctgtatctgcataatgaaatacctcgagaagggactcaaatctaaacaaaacagtacatctatgctctgtacatacctggcattcatagcccgaggaaagccttaggaagtgctttaaatcattccatgcattacaccacgttccatgatattttcctaaaagtttggggactggagatacaactcagcagtcaggagccctggctgctcttccagaagacctggactcggttcctagcaccctcgtggcagctcacaaccttctgcaattctagttctaggagacccagtgtcttttgctggacttggtgggcactgaacatgtatggtacacagaaaatactcatatacataaaatatttttttaatctcaagagaatgacaaagtttctgactttggacttttggatcagaaatgttcaagctgtgctgtttttttgctcatctgcatataagtgggatcataaaggtagatgtgaagccaatgaggtgacccagcaggtcacggtgcttgccacacaagcctgatgacctgacttagacgcctgggacctgggcatagagagactctctgtgtagcacatggcaggcactctcgtcatggtctgatcatgggtgtcagggaatatgtttcagttacctgttattcaccccttcctggtatagtggcgatgtctgaacacaatatttggtacctggcactagatggaagaggttgccaacaggacatgagttatacatgctgagaacgcaggggaagagaacactgacgccctaagggtgtggggtcacccttttatacagaggaagaagtatggtcagaggggggctggcttcatagtaacgagatggatgtatgcaccaggatcctagtgagcttctttgagtaattctaactctaggagatggtgccacatcctccactcaggaatgagcaggaactgtgcctggtctgttagcaagaggagctcacagttaggcctgtccaggcttccaagtgccaagactgcacatcgagactcactctggagccttttagcataggtggctacattgtaaacactctctctccacatggcttacctttcgactttaggctagcttggcgtgcagaggtatctttcctttgagttagccacttttttaatatttagctcttcttttcctgaactgtggtcaaagggaattcctgtcttctgggagcctgactgtctggcatgagctttattcaagtctcagctaaatctgagtacctcacacgtctctagttggctgttccctttgcctaggtcaaggccgttaggatttccctggaccttttggcatctcttctcaatatgaaacaaccctgagacccctcaaactgtctcctttacctgtaaccagtacacagcttcagctaggactgccacagcccttcagggacatccttgagttgattctccacctagccatcttgaaatgcttggtgtacaggctcttgaccagatgccattggactaacggtactgttcaagcatgagaggtttcctgccttcacagaagtctcagctcatcctcagacttgagatttaacagagagagacctgagaacaacacactgtggagctcaggggaggccttcccaggaaagttcccaggaaagttcccaggaaagttccaagtggggccaactcctagataatcagtccagggtctgtcaacggtgggggagaaccccccctactcctgcctcccacagggaaggaatgctactgaggatcattcagactggacaacaactgcgaagggggcgctccctccccccccccacgccctgtaagtgctattatttttaacaacagagctcagatcgttcacgaaacagttcaaccgcagatgtaatttgctcctccgtcagcactggggtttaaaatttcaaatgatccctgtcaatggcagtcttgaacacttgaaaatggcatcatggtaaaacaggtggcaaatgcacttaagatccaagagcagcactgagctcttcttatgtaccgaccgaccagaacctcagaacttccatgtgccccacttagcctacctctagccattcacctctgttatgcacatccatctctgtgccccccaaaaccccacgcagtcttctgaccgttgctcttcctcataaggacctaggtgaaagggcctttctcttcactctgctgcacccaccctgggggaaggacttagatgaaacccttaaagaaatgactatggagtgactttggggttttaaggagtctgaaatatctttaagaagaaaggctactgtcatgtgtgagcattagtcatatgctaaaaatgctagcaggaactggcttaaaataaagtcatgagcaccagagggaagatggtgaaaggcaaacagaaattatgccctgggctggtaggggggtcagcagagtctccatagaggtgagaactcaggcctccagtaaaagttacattcctttcctaatttccagtcaaccagcaaaatgctgactctaggaggagggaggctttgcctgttggaatctgacatccaggaaccctcagactggagtttagcagtgaattaagtgtctgggccctgttcctcctctgttcccttcctggcttctgttcacagtctgagcatctctaacctgattttttggtgtcctgccctccagattgttagtggggtatgattaaattgcaagatgcttttcaactgataacagggtgcagtcctggtgaatccatctacaagctgcatgataattaagtcaggaatgcttaaatggaccttggatcagcatcctaagacattctggagtttgtgtcaggagtctggaatctgtcgggattgtgagtctgagctggacaatagcttcctgccaccatgtaacctctctaaagaggagtagagcacttacttctgggccaggagaagatccaaactgaaaattctaagtgcagtctctccagaatgtgaatcaacttgaggccattgacaagtcagactgcctgctctcatagtctctcggggccttcctggcacactggttcctccagctaggactctgaaaccctggtcagtcttctctttgcagcctcctctcccatagctcctggccctcactgatccgacactctgacatgtgtgtgtgtgtgtgtgtgtgtgtgtgtgtgtgtgtgtgtgtgtgtgtacttattcctggagttcccttccactcccaaactccatccttctcttgggttccacccagtgagtccctcttctggattgttcccgtagaggctgcctgcaccttctttgaaatcagcactcatactcagggttctctgggcacttgtgtttttaatcttctctcaagaggctggccatccagctggtccacatagcatgctggagatcagggactcagcactgaacagactctgagcatcctgtggacacaggggaggcagagaacaccggttttgaaggtgtataagcaagaaaatatcacttcagtattgttgtatctatatgcatccccaagtattggttcagcacacctagcatttatggagtgattgctgtataccctttggtatctagcagtgtaggctaatgatatcatttagtctttacccttcctctttcttgcatttgaggaaaatgtagcttgtgaggcaggcagggccaatgtataaaccttctctgggactcctgtgagccttgctgtgacatagaggagtactgatagcccagcagaggggctgtcctcacaggcccataaaccagcagcaacaggatggtatagcagtgtatcagaggtggggtacagagtgggtcgttaaggaaaacatgatcaggagggaagctgcaagcttgtgcatttttcacaaagaaacatgtggaatggtcaggccagaggaaggccaggggaagctgacagatgggaggaagggatgctagaacaatccatctggggacggacagagggcaggtaaagtgtgtgtgtgcgcacgcagctagaaaccatagtcagttgagcctctgttcctagggcagggaaaatccatggggcagttataagtatgtgatgactgatatgattagggcccctttcggctgctagggaggtcaactggacaaggaccagcattagggtgggaagcacatcatgtccacgttattactcaggtaagagataaaggtgatgtggacaggggtgagaaataataataatacaggagcagaagcaatgtaatgagagaattacagtgaatgaaactaattagcccacagatactgtcctggttgattgggttttgttttttgtttgtttggccactcaacacagctagagttgtctgggaaagggtacctcagttgagaaaatgcctccatcagactggcctgtaggcagatgtcagggagtattttcttgattaatgatttttggaagagggctcagctcactccagggtggggccacccctgggcaggtggccctgggtactataaggaagcaggccgaacaagccaagacgagcaagccaggaagcagcacccctctgtgacctctgcttcagctcctgcctcccgatgcctaccatgttcaagttcctgtcctgactttcgatgagcaacagggatgtggaagtgtaagccaaataaaccatttcctctccggcttgactctgttcgtggtgtttcatcacagcagttaaaaactctaagacagagaccgtctgggtgtggtggtgaaggtgtcatggggagagagggatctgaatgcctcctacctgtggggtgtgcctagtgacctggtgaccagttggcaataccatttgtagagatgagaaccctagatgtgaagaggacatgatagcattaagatgtctggattatgacctatgactatgtggtctggggaatctgagtggttcgtggaaggttcggcctgaggacttgaaagaacgctggtggggattcgagcttgagaatctataaagatggtataaaagatacaggactggatgtgtttactaaggggaaacgaggaggagggcggcggggcatgcaggtttcctgtcttcaccgggagctcctgtcttagagtttgtattgctgtgatgaaacacccatctggtcaaactgctgtgcctcagacacagtgaccacctcctaagagttcagcattccactttggctgatgccttctgtcacggatctagactatccttgcttccggttacgtcaccggaagtttcgtgggactcaattgtacctacactatatacagtatttgttttgtattcccaccatctgagcactgggtggggagggggggttgggaggggatgcaactccatcattgagagacctaggagaaataaagagcagcatttgccagcctaaaggtccagagaactccatgttctcttcatggccacttaaataagggattggcctctccccatggcttcatgttacccttgctgtctctagccagaagacaggagtattggcaaacagggcttaccgagatgggagagaagttggttctttgtgcacagatcagacttaatacttgagtttttccctaagcccaccaacagaagcacacatgcatgtgagcaagtgcagagccctctggcctacagacccaaccagctgcaagttggaaatatttgaaataaagcattgcccatcctggtcatgtgcacacgccttttctacatcattagtctccaaatgatacagctctgtatatatgtatatgcatatgtgtatgtgtatgcacatatatacatacatacatacatacatacatacatattgctcaggcattgtgaggctgttagagatgatctgagtctagatcctgtgaaaatactgtaccacggtgtccacaggagaaccctaaacaatctcccggacatattgaagagcatctaaaacccctttaacggttttattcttcaacagtttggtatacaatgtactctggtcattttcacctcccattacccttctcatctcacctccctcccactcccctggagccttttcttctaaccaatctgcctccccttctacgttcatgacttttatgtcttattttgtttggtatgacccagtgagttttatcaaggttaactatatgagcatagatttaaaggatcatggataacttaccagtggcttcacaaatgatttccccctccccagcgaccattcatcgccaatcagggaggaatggagcctcccaaggctcttggatggaatgaggatgcgaacaggtcttggggagagaaccaaggctgttgtgagtttgtgagtaccacagccgtgccatgtccaggagagagcctcccaagcctttgaccactttgccccttccatctcctggtcccctagaccactgagaaggtcaagtataggcatccctgggacttttacttgttaatcaatttattttcagctgattaagcccaaggccttgggcattctaagcaagtgctctctcactgagccacagccccaacccctgtaaaacccttttacatcgtgattctaaggtgcagaggaagagtccatgaagggtcttctcagacctcgtggccctcggctttcctctctgaagcagccctgagctgccaagaactctgaggctctgcctttgctctgaagttcactcggtcgagcgcacgcctttttctctttattttctcttgcaggcggatgtcatggatcagaacttgttaaatttccttccagagcaagaacattccgaagtttataaaatcctttcctcccatatgcttgtgacggattccccctccccagaattcctaaaatgtaagtcctccctcctggtgttgttattggatctgaagacaagaattttgctctagctagggaaaggaggtcagaatgaattaagaaggaaggactaattttaaggataattttcctcgtgactcagaacatttccaagatccttttgaggtatattttaagttgaagctaaaactggaacttggagcacgtacgacattttagcttttatgtggaaacgttgaaagtatagcttcagaataataacatgtttcatgtgtatggcaagagatgcctttttacatgagagtaataaatagggcaaaattcagggagcaggctgctgatcttagggaacactacaatgtaaagtttctgtggcagcagataatcaactgctaattgaataattaggttggaaatccatattctgtcctcctgcggctgtcttctggttatttacttgcatgtgcaattttttggaagtttgagatttatatcaaaatatttggcaacctagatagaaggcaggcctcggtgtgtgctcaccacgcgccgcctaacgaagcatacgcaatggcaggcagtagcaaagacgcttgcatttgctcaagcctcagtccatttccatgcataattggtcccgtcgtacatctgatttcccttcaaagcaaagcaaaaaagagattaaattaaagagagcggctctatgcgagcagctttattttagtacgccatgtgaaaacaaccagaactaatcgatgccgacataaccaaccacagacatctgtgggtagattgactaattgggtccaagtatagaatacggaatatggatgagctgcagggagaacggcctggagctgcaagggttagaagccaggtctaacggcccgtcatacggagaaaaccacgcaggccacgcgtggagcaaaccctacaggcgcaacttgtttagtctggagtctgtgtaaccctcctctccctttctcttttctccctctaacgacccagctgacaacgatttagagttttattgccatcttctcagaggcagcttgaacccaaaggaatttccaacttacgaatatataaaatttgtaggaaattttcgctcttacaacaatggtaagctttaatcgtcctattctttcaatggtgtcttttatcatgcaaacgtgtacctgaggtcccaagaattattatttcatgcctgcgtttggatttttcctgtttctgggaccaacagagagagagagagagagagagagagagagtatgtgtgtgtgtgtgtgtgtgtgtgtgtatgtgtctgtgtgtgtgtgtctgtttgtgttcaccagtgccctctcacattcaagagtgcatcttgtgccagtgtgcacactcaccctgaattgtatgagatccattcatttgttttcgagctgatgagataatcttgtgcagtgaggaatagtttagttaataaggaccaggctcagcctgcagactctgccaaacaggcctgtgctgtgacacccagctatgtcccctttgctcccggcatgtttgtctcccctgtacagactgctgcaggtctgatgtaataggcctggctcacaggtcttcactcactaccgtccctgtgcacacttagtaaggaggctgctttaccatgagccaggaattctgcattggagaaattatcacacagaagtcagtttgattttcagaaactgccaaaacggctagttgcccaacctctaactgcagagacatgagctctaacctatacttaaacactccttcttacttgtgacccatgctaaatgggaatacagctctaatgccagacgtttcaaaaccaggttcctttctgggtgaagcactgaaaggcccacttccttatttgccatggccctcaaacgccacacaaagtagaaaagctaatatttcctaaaacagcaaagaaaaaaaaaaagcagaaggtgctgatgggaactgggggaggaggagaaaaggagggaatgatatcagaagaaagtagagtgggtgctgagctgcagagaggaggagggcctgtgggaggcacagggaacacagaacagctcgaacttctgctgccttagttactactgtttgactcgggacccacctggggctgttcactccagccagattagcccaggttccaatggagcaagccaacattacagcaccgcgtcccagtgctgaggctaactggattttttttttctttccaccctaaatgatccttggctgcatggtatttgaataaacacacatgcttcatttaaaaggcttcaaggagatgctaagtagggtaaacctgccagcgtgattttcaggtccttgtccagggattttgcctggagagtatcctctatggctggcttggctcttcaggggaccagtccatccaggggagggaaggcaattccttcttctatgtgggcccctaagtctgaatgaagccaaggcctgaccatgtctgatctggctaatctgaaaagcttggtcaaacttcatgagacaaagttaaggaagccgttacacagcagtaagtggtagacagcaggctgcccgcccaactgaagaagttggcatctgatgataggaaagccaacaccatgccaaccccagaacagctagatgccgcagcttgttaaaatgcaaattcttaggctttgttcaaagatgcaagttcaaggggcccaaggcccaggaccatgaggagtgactataggagtcttaaacattgagaattcattattgtatcattccctagagatcaatagtgctccttccaatcagctctattgttgactataaggaaggggctattcaacgaaggcatgaaatgtgctgacttgttaagaactaaacccactcttcctggaagcagccagaggtcacctgccaagatggttcgctactctcttgacccagaaaaccccacaaaatcatgcaaatcaagaggttcaaaccttcgtgttcactttaagaacactcgggaaactgcccaggccatcaagggtatgcatatcagcagagccaccaagtatctgaaggatgtcactttaaagaagcaatgtgtgccattccggtgttataatggaggagttggtaggtgcgcccaggccaaacagtggggctggacacagggtcagtggccaaaaaagagtgctgaatttttgctgcacatgcttaaaaatgcagagagtaacgctgaacttaagggtttagacttagattctctagtcattgaacacatcctggtgaacaaggcacctaggatacgccgactaacctacagagctcatggcgggattaacccatacatgagctccccctgccacagtgagatgatcctcactgagaaggaacagatcgttccaaagccagaagaggaggctgcacagaagaaaaagatatcccagaagaaactgaagaagcaaaaactcatggcccgggaataaattcagcataaaataaatgcagataaagttaaaaagaagaagaagaagaagaagaagaagaagaagaagaagaagaagaagaagaagaagaagaagaactaaacccaactaccgtaggatccagtcacccccacatcttagggcacacccaaaggaacgaatgcagggattgaagaggcatttgagcacattcataaagagttgcaatggccaaaagttagaagcagtcccattgttcttcagtgggtgaatggattaaaagtgtgcagtacccttacagtgaattgtcacagcctgtaaaaggaggggaattctggcatatgctcaacatagcggagctttgagaatcattgtgctaagtacagtaaacctgccatcaaagggcaagcatcgtgtgattccactcagatgcggcacctatcgtaattaacttcataaggataaagtgaagggcgtctgtcccgggctgggggaggggccagtgaggagttgccgagtgggtatcagtttccatttggtaagaccgagttctagggacggacggtgctatcagtatacagatgtgcttgacactacttctgcgtatatttaaatgcagtatgggaaccgggatgttgctcagcaacatccaaaaagaaaaaaggctaggtggtaaactttattctaaacagtgctttatcataatatctataacatgtgggactgttggccttaatggtagctgctacaaccgcagaatatcctaagcatccaaaggcacagagggaaagtcgccctggctctcagactgagaactatggccgctgctcccacatggccttgcgtcagcagtgcgcatgctcagttcaaagaccacccctgtgaacttgtatttctcttactaaaaagcttccatacagtgctttaaatcatcccattgtataacatatcttaggaggtttcaaggatgtaggcgggcttcattcttacctgagctgtatttttagtttttttgttttgtttgatttggtttgttttggttgattggttgttgttttgtttgtttgtttttcttttgtttgttgtagcaaggcttaattttcacttcaagctgagaccgcgttggcttgcttgaaagagtgtgtggaaattatgtgtgactttttaacactgctttttttttttaactgttgctgctataaacacgaagcatcatccaaagcaagaatgttaaaagcaagagcatagtgtccctctagagcatcttatatgagctgaagttagaaaggctagatgtggacaagagtccccaagtgtacataatgacttggcctgaacgcaaaagaccagaagtgaaatgaagaggtgactacagttagctgagagacataaatctgatgttgcttatgttcctttccaccacagcagtgtgactggagatagccctaatgtactgctcatttaaagctctacaagagaggaccttaagtgttctctaaccacaaagaaaggatcaacatttgaggaggtaccaacacttgccctggtttgaatattgtacaacatacctgaaacatcacctggctccttcttactatgtataattgttaggagtcaacctaagaaataagggctagggtataagtccataatgatgctctccagcagcatgcattgtgccctgggattccttctgagcatgcgcagagaggagagcggctagcgctgaatcagcgagagcttttggagaccctccgggtttgtacatgaggatcaagtctgctttcttgttgactctggataacactttgagactcccccagcctcttaacctttgctttctcgtgggagttttggaactcacccgttcacctctgtctaccatcccagtttactgagcagtataaacactagcagttgaccaaagacttgagcaaaatggaaatttccctctccttaatgtttgcacgtggtagtcattccttaggagagatggccattggtccccatgttctaggaaaaagatataaaacacttctttatcctatgtgtgtttaacatgttgggaaatgggacaagaaattggtcattttagaagagttcttggcctgtctggcaagggctcctgaaggatccagagtgggctaagtgagcatatgtccccaccaaggaccctggctagccgatagcagtgaggtggtcactgttcacaacagccctgtcttcctctgctctatgtgttgatcatttccagaacatggctaaaataaaaagactctatttgaactttgtctgtcatataacagatgttttctacaaggagaggcgaggggacattcttcttttgggcaaacacacgtggccctgtattttcacttttctaattaaatatgcaatcaggaagatcttcttgggctccaggtacccaatgccacatccacttccctactgctgcatgagcagaaagacaacagctagaggaatctccagaacacgatgaacatctttgctttaaggggccataagaagcaggtcctactcctagcaggtctttccatggaagaagaaagctgtccttgattgggtcctcccacagccttggacttaaatgtgcatctggctgaaatccagaacacagcatttcaaaagtcactggtatggttccaaataggtcaccctcagcaaacattccaccctgggctttccagaaaccacacaccagagtataaaagtttccttgccctcattttgcctagttgcttctaaccacagcaccagattaaagcgttggcagaagccagggcctttcagcttctaactcttggatccatgtgttcccagggatctctgtaggttgcctggctttgaggttgttgcttttgtatctgtttctccccagtgctaattagctaaggtgtcttggtataagagatcaagacgcagttacagcagagctccctgaatacagaggcaaggggttggagacgtcttatatggagtgtctggtgtaagcatcactggcctctaagagctggcagcaaagtttgtcctcttctcagccaggcagcatggactcctccctcagtggtgatcagctatcagattagacaacagcagggttcagatcgtggcaaataagaagctatttcccaaggccgtggtctcacaccatcatctcagatccatattacaatggagctatgtggaatttataggcacacatttatcaactacatctttctgctccatctcatctgggatttgagaaacttcatgcgcaatgcgcaagatggtctataattttaactgaaagcatgtcaaaaatatccagacaggatgagggctgcaggaggaagttcactttcctcaacatatgaagaatttacccctacccacactaaccctcagggggaaatcttaactccgttaccaaagtcctctggccctttaaaaatctcagtgaatgccagaaagtagaaaagatttaagtaagacatacagtttccctttagttcagcaaactgccaacctagccatttcatagaggctcttatcttgcttgcctttatgctaagcagacctggcaggaataaaaagaagccaagcatgattcgagccacgtaggcggtactcgggttaggatgtggcagagtaagcatgcgactgtctcccaagaacgttgctatctggctgttcagaacacacccaacagagcatgctgtaaaccctgacatcttgctgttcaaaacagacctaatagagcaagctgcaaagaagaaaacatggagtctgaaatcacttagcacttcattagtgggagacgatgcctcatgaatggactggaaagtatttacctctcaatggctccacaccataattaaacacatagtaatatctgtcaaacttagagcgttaggaacctccttctgctgagccaatctcacctctgactgctaagccacgtctttctagatatccatcaacatcgtctctcatttgtttcaagaaatgcctagaaagttagctcttacattctgtgtggactagtcatatgctttcttacagactttgcaaatagcatatcgcagctcatccaaggagagtgtttagctgagatgactgagctgctggccgagtgggacatggtcaggacatctttcttccttctttactgctaactaacattcactgctaggtctgatctcacccccatcctttcctaaaccccatgagataagttcccttccacctaagatccccaggccattcgtccattattgcaactcatcctgtgtccttatcatgactgatagatactatcttagaaaagctcagagcttgggaacctttggaccaaacatttaagtctgaagacctaaagctgtgtcacccttcaactctccaggtaggatcccctgttagacacttccactgtttgtcaaaccttaatggtgatagagcatggaattcccagccaccatcctgcccgggcctcctttggagcagtgttcatccttcagtaggtagggtagtgagctagcctgaatgccaacgacttccagaaccctccaacagtggcagagtggaggaactgtaaaggacaatcaaccctaggatcctcaagtctgtgtgccagttaccaatgaagatcagaatgctccttcctgaacggagccctaagctcagtttgagtgtggaacagacatcctccctgagggagtcatccagaaaacctgagaacccgctgggtgtagtaggacccctgtgcagcactggagatgggaagcaagacccggcttcgtgtggaaagaccagcttccccagcctttggcaagaagagcatctgttttgagtaagcaaaatggagagagagataaacactcctctataccatgcgtgccttcaaggtctctggccaaccggagaaagcagggctgtgccgacagtcagtggcaaatccttctgagatgtaaggaagccagttgtaattagatgtatttttttctattatttaaacctaaataggtaattgaatccttaattaaggggctttaaactaccttgggatctgaagtgccagagagttattctaagtgctaagtatgactgtgcagcgtgtgtgtgtgtgtgtgtgtgtgtgtgtgtgtgtgtgtgttgcctctggaatacgtgagagccttatgcttcaagtaaaacatcatttcacagttaaccagcagtgtgggaaggagcttcctctcctgggcctctaccccctctccacctctattaaaatattcaccctgggggatggcaagatggctcagcgggttaagagcactgactgcatttccgaaggtcctgagttcaaatcccagaaatcacatggtggctcacaaccacccgtagtgagacctgacaccttcttctggtgcatcagaagtcagctacagtgtacttatgtataataataaatgaatctttgggccagagcaagcagagacttgagtgagctgggcggaccgaattgagtggggccaaccagagtgagcaggggttgaccggaaaaagcagaggtcctaaaaattcaatccccaacaaccacatgaaggctcacagccatctgtacagctacagtgtactcatataaataattaaataaatatataaataaataaatctttaaaaacaaaaacaaaaaaaaaaaaaaacattcactctggttcctatcactgtggatcaggtgctcagatgcctcagactttgggtagggaaagcttgtttggaaaaacagacactcactttggggcccaagtgtaggctacctgtaatgaaggaccatccttggcaaggattgaccggggagggggggcgggggggttagggagtgggtcagatttttacctttgaagcctttgaagttataaaagtgcagataaaactgttggaaggcgggctggagagatggctcagcagttaagagcatcgactgttcttccagaggtcatgagttcaaatcccagaatgggactcacagccatctgtaatgagatcagacaccctcttctggtgtgtctgaagatagctacagtgtacttacatacaacaataaataaatctttgggccagaatgagcagggctggagcgagcagaggtcctgagttcaattcccaccaaccacaagatggctcacaaccatctgtcctgctaccatgtactcatatacataaaataaataaatcttttttaaaaaaaaaaactattggaaggcagccaggccaagtgggaagtacaaaatcccactgaatgtccaccacgccagtctctgctgctcttgaggaaggaacaacacatattaggtggggatttcccacttccccatcttctgcccctttccacaggaaatcagggagaaggtccttgctggcagcttgtgggttcagtagctaaggggtagctcaaaccaggtacatcagtagagagagaaggatgccgccttaagtccctagtgggtcctcagaaatttgcttccaaggtctcagtatcccaaaaagagtcaagagaattttatgaggtaattatctggcagggtaatgtctcttcaattcgagcagagaggatttcacatctgggaaatttttaatgtcttttttttattacacagatgttcacgtctgcagaccttccctgtgtgggattgtcttccttccccttgataaatctcttggctcaccccacacaacaagcctacaactgtcttaagccagctcacgccagatgtgagctctctcgagatcactacttgccattttacgcacctcatgtttgtgtttggaaacatttattagtatttatgcaagtggattcagagaatgagtttggtaaagtgaatttattcatgtcagcggagagcagaccaaattataggatcatttgcaaacctataaatatagaaaacaaaaaaaaagtgattggaaagctaaactataatcctgaggatttcattttaaacgcatttggtttcccgatgttccatatgcttttggttaaattggaaggcataatgatactgaaatctgtgagtgtaaaaagcacaggttaaatagtcacttgtcactgtccactggggggttgtccccagacacattagacaccaaaacccatggctggttggcccccttatataaaacagtctgatattttcatagcacccacacaccccatatattttaaatcatctctagatgactttcagtgcctagcaccatgtaaatgctacatgcttttattcaattccttgggaaacaatgatgttgaaaagatgtgtttgtgtgtgtgtgtgtgtgtgtgtgtgtgtgtgtgtgtgcattcaataaatatatagtggcttttttcagatatatgggatccatagttggtctattttccagattcagaagtcacagttgtaaagagccaactgtaaccagtcataatttttaaagaagaggttgtatggtcctctattctagaaatccttggacctggcgtatggttagccagtggagctctggaaagtgcccatgcctaaattatgtgatctggacagagcccaagtagccaaaccagaggttctaggggagccagccagacattggaatttgaggattctgtggatgtgccaacttggttattttcatattttactgggttctttcctcaccaaagtcaatcaagataatagaatttttctggcccagaatggcagttagttctccacagtcaccctgaagaaaggtctggtggcctccaggaaggacttcactgatgccaagtggcatcttagggggtgcactgggagtccagggtaaacctttactccctatgaacctgggttcgtgcaaagaccagtggggctctcgttccaatagcttctctctgagcgacttttccaggcctcagtctcctcaaagctgcttaatacatggctggtaccaacatttaacaagttttctgtgcgtctggttcagagtttcagagttgctcggttgtcctgttgctctgtggcctgtgctggggaggatcatcatcgcagggagcacacagcacacgtcagagcagagctgcttaataggcggctgggagagagacagtatggatgaaatcagagtctaaccatctcttccaaaggcagaactccaggagccaaggacatcccactaagcaccacctctcagaggttctaccacttccaggcagcaccaaactggaaactgagcctttaccacataggtgtttgtaggatatccaagtcccaagctgtaactacctacatcccaaggacatcttctcagggacccaggccctatgtcattccagactccctaagatgacagacccttcatgcctgagaagagaccacttctttccatgggatgatctgtaatgggaacaagctggactatggaatttaccttagaacatcagcagatgtcaacatctagccctcctcacctgtagaccgcagttctcaacctatgggccgtgacccctctgggggttgaacaacccttttaaagatctcccacataccatacatttacattatgattcttagcagcaacaaaatcacagttacgaagtaacaacgagataatttttatagttggactcaccacaacatgaggagctatgttaaaggggtgacgacactccgaaggttgagaaccgcttccgtagaaggaggccttgcattatagatcagtttctccaacacaaaggaaattttgaatagcttgtggaagtgaaggtcagtggggcatggtgactactagcatggactggattctcagttcagctgctaggaagatgacttaaaacaagtgcttccctttccttatgtgtgttccatgggagtaacaggtgtaccttaatcatcgggttgtcataaaaacagagcaagttaggatacaaaaactcctgaaagtaggaagtgtcgggtaagggttagctagtgttaccaggcagggctaactcgtgtgtctttctccatctcagtgcctagcccctcctgtaatggctttgacaacaccctttcaagaccctgccatgtacccctaggaaaggacgtctgcttcatcgccaccgtgcgcctggcaaccccgcagttcttaaaggcaagtccctgacagtgatgtcatggggacctcgttcatcgatgtcaacttggctacgagccatttatcatccttgtggaagagaataaaattgcagtagagttcgttttaaaaattagttttcgaaactctaaatgtctagtttctgtgcctgcccccccccaaggacccatcccaagtcccaggttcctgtggattgtttagtttgaaggaagcacccactgctgataggttcacagagatggaggctaactgcaggcgtcgaatggtcgaaataccattgtgtgctaagtaggcgtggctcagactgtgagtcaaggaaaaaaaaaaaaaaacacgagcattgattgtatttcccttctgtggtctcgactcacatctctggtacaaatgtggatggaattaagttagtaattcagattccgatgaaaagccatctccacgtgtttgccacaattccagagaatgggaagcaggggagggggaatgggaagccactgtgtggctcctaggttcttttcccaatttgtgaaatgaattgaggatcagctaatacgggaattagctacagatgacaaatttcggtacagcactatttggagattagctcagaacagttttaatttgtattatccatccttcattccttttgaaccaacctagggtaagcatctggcaccccaagtaacgttctgccttttttttcttcttcttcttcttccttttccaacacaggaaatgtgtgtagctgacgaacctttagaggaattcacttcgaggcatagcttggaatggaaatttttatttctggatcacaggtttgtgaggagaagaaaaacatatttgagttgggtccttttcaactgttgtttgcatgagccaggctccacttgggagaataaagtccagcctggtccctgacaggggaaggactccttggcaataggaacagttgttcccagctaaggggaaggccggtaccctgacatccttgtgcctgtcccacttgcgatcgggtcctatgttcagagtgatgccttagccccaagatgtctttggggtggtcctaactcaggccatttctagtttccaattggcaagaaacaaatgtgaggagagaaattctctgatttctttcatcgccctttgatccttcagcccaattcttcatctttccttcacagcatcacagctgatgaatgcgcaaccacccttccccaacctttaattggggcattgggctggatcagtctccagctgtttaaattcttcaatatctataagttcttattatcattcaggccaggttatcccaaggactggagtgcctatacgctgaaacaaaccggttctttacaaagactctctggccctaaccattgttacattgttgcattgctacattgctggtttcctgccccctggttcttgataaatgaggcttccatggaaactaagcttgcaaactgagttgttaacaaccagtttgtgagttgtgcttgaagagttccccatgtctccctgcagagctcctccaatcataggatacctgccctttgaagtacttggcacctcaggctacgactactaccacattgatgacctggagctcctggccaggtgccaccagcatcgtgagtaccgtacactcacctgccggaccgggagtcttgtgtttgcttttcagggcccaaacagcaggattctgtggccctggaagccctgcttgccatggtgggccaggcatggtgtcccatgcagtaatcatgaggactactggaattcgttcctatacttagccctatgggtccaacatggaattaatattgcccagatccctagcaacattccgctatcatccagaaagtcatgcttattaatcctaatcaaaaaattaaggcagggctagactttcttttaggctatggaatgcacttgaaagataaaataccaaatgttctgcctgctcttgaggcagaccacaaggctaaggttgatgtcctggcctccctaaatacaacattctcaagggagtggctctgtagcctgactttcccagtaaacattcttttggacattcacccaaaagatgctcggaactgtgaccagcatctcctggctgccctccacggtgaggtctgctgagaagtccagaagcagatgactttgcaagatgctgccagtgtggaaggggtatgcgcaggatcttgaggggattgcagggcacctccaacactgagggaaaagtcagaaaaggctctgtgccacagaagaggggagcactccagcaagcatttagagtaggccacatacatgccccaggaaagcaagaattacaaacttttccagttctcattcacaagaagaaacaaccactcagagtgattttcggcaccaaggctcagctttgggtaaaaacagtttccataacattgagctatggcttctgataaatggtccgtggacattggtcttccgtagatgccttacctataggagctgttcggacttcctttctgtgctgtccttgttaacagaggagcatgctgaaattgcagctaaggtctgttgggatataaagtccatcttaaccgtcaccctttgctcctcaaaatatagcttagacaagccgcataagcaccagattagctttagtatagactctcaggctcccttcaccagggatcagggttgggacgcacattcagataggagaagcatgtctgttttaaacttctggctgcctctgactcttgtagcatagagaagcctttcaggttaaaaaattacactgagcatctgtaagacttgcccagtggctctggcaagatctgtgcttgctttgtagagcccacacttccgtttgttggccctccctgctcagaactacattgttttgaggccatggttccctttgctagccccacttccttaagtaagactcttcgagatggatttcattacaagatgctaaattgcgagccctgtggcaataaaatccaaattggtcttcttcctcagatccataatttatctgtctgcctcacgtgagctaatgaaccactggtgtgcattctgtcctggatcctcccctccccacaagcagccatctgtagacaaaactccaggcagttatgcagctgcagggaagacctggactgtaggcggccatgccagactctattctaaaacggtgtagactgagactcaactgtggacgacagctggagagtctgtccgtcagtagctagttgtcaggtctattttgggtccacttctcccagcgtctggatgctcactcctctgcccggctcttgaaggtccaaaggctttgtacctccagcaggaagatgagtcccaagaaagccagggcctccttttacttaagcctcaggaaaatctatccttgtgtgccatctcgtgaggaagagctttttaagcctttgtgcaattgggagcatacagatcgctgtattaagaattcttccatttgactgaatatgactaagtcaaagcacatgcctaataagtatgaggccccaaactcaatccccaggaccccacaaccctccccaagagtattagatagtatggtaacagtcccttaaagtatgatgctaccaggaaaataagcaatatttggtgctgtctcctacagtgtttgaattttagttgtaagttttgggggaaaggtcacttttacattagtgcatacttcatacagagtctgctgtttctcctcctagtgatgcagtttggcaaagggaagtcgtgctgttaccggtttctaaccaaagggcagcagtggatttggttgcaaacccactactacatcacctaccaccaatggaactccaagcctgagttcatcgtatgcacacactcagtggtcaggtactgagtagcctgggcctctgggaggtgtctgggaaggtgggtgaggttcccccagggatagggaaggaccaggggccaccttaagtacaccctgtatgagaggagaaattccggctggcatctgcagcaagctggacagtcagaactcagcccctgcccaggtagacacccctctcctccaggcctggaacttcctgtgagttctcagtcaaacccgtttgaaagctgccaggatattacttagtgagttcctgcttcagtgacctacttacatatttttccctcatctctctccagcccccagcttttccttgttgctgtttttgagaggaaaattaaaatgttgtcaccaaataactcaaacacatacttctttttttttttgttgtttttctttaaggcaaaaaaaaaaaaaaaaacaaaaaacaaaaaacaaaaaacaaaaaaccctgctggcaactgagatagtattaagagaacatctgggctgcctgtaggaaactggccctaggggtccctagcaactttggggagccctcagttcagtatggataagcagggagtcaaagggtaacaatatatccgaatagcatagatgtatcccctgtgggttcccagctctcagaggtaaagggaagtggccgttccccctccatcccagcacagacacaccatgacaactagctgacctgaggctggtttagaagaaagactttgtgcccagcacagtggcatgctcctataatcctagcatgagaagctgagtcaggaggatctccagtttgaggccagcctgggctgaaggtgagaccatgtctcggaaaaacaaattaataaaataataaatagcccatccttctatcaagtagattttacatccatatatggctaatcactgatggaaagtattttaaattaaattcatattaaagatagacaagcatttttttcttctcactctttgtaaagagcatagtatagcagctatgtgcaaagcatttacattgtattgcactgtgtgttaaaaggaaactacctgtgtgtgaagtttgcaagagggtgattgcaatgctaccccgttttatattagggacttgagcttctatagagggataatatgtatttgtatgtgtatgtatatatgcatatatgcctatatatgtatgtatatgtgtatgtgtgtatatgtatatatgtatattatgtatatgtgtgtatgcttatatatgtatgtatatgtatatatgtatgtatatgtgtatgtgtgtatatgtatattatgtatatgtgtatatgtgtgtatgcttatatatgtatgtatatgtgtgtatgtgtgtatatgtatatgttacatatacatatatgtgtaacacatatgaagattggcacacgtctctgcatatataaatgtgcattagtaggaggagaatagggaagcactggcctttctcagccattgactacatctcattttatcacaacatgcactcatgctcagactccttctttggttcccagcccatcctcttgggttttctcagtcagtggctcgtggcctgtggccttgtggctagtagtcgttcattgcctctcagactgtgtcttttccagtgggctgctcagtctctcagagaggatgcatgacacccttgctctctccttcctcccgcatcgtaggaagaagctaggtctgggagagcatgaggactgagccgaggagataaaccagggctcagacactccaggctctcatcccaggctcctcctaatcctgcgactgcaccatagagttatctacagtagacaaagtgggtccctagactcagcagtggcctgggactgtctaggtcttggtttgtttctttgtatatacataatgaacatgtttgaagcacaggtttctgttttgttttgttttgtttttttggtttggtgggggttttttgggttgtttttgtttttgttttgtttttgttttgtttttgtttttgtttttgtttttcgagacagggtttctctttatagccctggctgtcctggaactcattttgtagaccaggctagccttgaactcagaaatctgccttcctctgcctcctgagtgctggaattaaaggcgtgcaccaccacgcctggcctgaagcacactttttaattctttacaagcagaagcttagcaacaaacaaaagtatatcttaaaagctaacgtatctgtagatttcaggtaataaagggatagagaacagaggggagagaaataaacccagcccagaactgaaaatagctggtacataatattaaaatctttgcaaggcaattaggcaggaatgagactcggtcctctgagcaggtcacagatgggcttccttgggccacacattctatgagtaggttttatatagaaagctccatgtgtccccatgggcattgccttcctggaatgtccaggcttcacagtggtttctcttttctgagcagttacgcagatgttcgagtggaaaggagacaggagctggctctggaagacccacccacagaggccatgcacccctctgcagtgaaggtgagttcatccctgctagagggaagggctaagcagtggcacctcccatgggtggtgccatctatcccattctgatagataccaggctagcaaggatggattcatctggactaagccctcgctggagacccatagctctcccgatagcttgtgggtgtttgctcatttgccttccaggatggtcccgtgaggtagatgctgtgtgctctctcccttccctccgatgagcatggaagcatgggtactcaaggacaggcttgtaaaaagctggctcaaaaacagcctctggactcaaggaatggcttggcaacttcccagccttccaatgatggctataaaaagccacagataaagtgccagagagcaattccatcacccactagagtgtggaacaatccaaggcctacatccctctcttagactaagctttattgtattgcttccaattattagcctgtgccccctgcactccccagctttgatcttgctttatggtactaggagtgcaatccatgtgaagctaccgccccatccctccctgtagtttctgactaggtgtcacaagattttagttagtagccaccttagcatcagctttgtcaggaatgccgatgtaaaaaggatccttcagtccaccaatcccaccacctccttcctttctctaccctgagttctctggtcccatctgtccagacttttcctcacacagtgccaagaaactatgaaggccagagccttgggtctcaaaggtcatttatacaacaagtagaaacattataagattaaaaaaaaagaagaagaagaaaagaaagaaagctaagaatgtcctatgctaagaaattatcagctagatgagcctgcgttctttcaagaaagcaagtgctgccagtcaatctatgaaataaggatttcttttcatcaattgtggataaacccttttttgggggatatgttgaaagctgggtgaatgcttggcagcagagtcgttcaagttctagggtgtccagaaacttagattccggaatctgaccagaggctttgcagcagcctgccagcctatctgtgatcaatagaaacatctgtcatcccttgtggatgaaattgggaggaaggaaaaatcaccctcaaggatcagagagccctgtctacagaggctcacctgatctctgtaagtgttccccacccatccttacctgaatggctgccatcacttagtgaaatgtctgcttcccacatcacactctgtcacagtgtcgggtcagagaatggaattcagctagcgttagacaggtgttagacacaccatacatcaaccacagagtaatataatatgtacccatcagcgaaacagaaatgtgtctctctctcgggtttctgtgtgaaaaggtaacacctccttttgaagtgaaacctctatgatgttgcctctcactctgtggtgatcttgtctgagggacatttaatgctccactgactgacatgtctgtgaaatgcagattccattgttggctgtgatattccatgctagcagtgcctgtgaatgaatgcccctccgtgtgcatgctcactcctggggccaattctcttggctgatcaggaatatgtgattcactgtggtatggtgcagtgacccttggaccagccttatctaaggagattgtcactaagcaaatgacatttcccaccacacatacaggtgcatcctgccatcctgtttgacagaaaagattgtaggtcacatatcagtcatgccggtcctctttatggggggcacgcacacacacacagacatacacatgcatgcacatacatgtatacacacatacacacgtgcatattcacactcacatacacacacatgtatacacactcacacacatacacatatttacactcacatagatgtgcgcacgtgtgcatgcatacacacacacacacacacaaacatacacatcatggtagcaaccgatctaaagtcagaacaacacatggactcacatatgtgaaactgaatacccaagtcagtgggtggtcattacacaatgggtgcggtaatttctcccttctgggttgccacaggacttaggggaataaacactgtgttttcttctttggcttaaaaaaaaaatcataacctatttgcatacactatgactcttacgccataaaggtttgtagcctgtccatcaaagctgctttctctcccgtcatatcttgtttggagtagacacgacctggaagccaggaccagataagagtcagatatcaaacaatgagagaccatagctttttacccatgcagagagcaagtgtgcacggcagcaaaggaagaaccctgtgatggcccagtgccctgtatctcatcgccatgttaacaagccatcactaatggtagccctactgcattctgatctctcgtttcagaaaactacaatacttgtcaatgagataactgttttaaggaacaaataaaatgtaaggtcagtggagggaatataaaaaaatcaaaataaaagagaaagaaggtgcaaataaaagtggtttgtaagacaaagcctcttggtgatggtacaacacatgagtatctatctactgtacccaaatgtatctagaaagattcctaagatgatagagcatttctcccactttcttccaaattcttctatgtactagaactaaggtcacattttccactcattcatggaatcttaatgctgaagcttatttttatttgtgtgtctgtttgtctatctgctcgcacgagctcatatgcacatgtgtgtgtttcaggaaaaggactcaagcctagagcctccacagccctttaatgcacttgacatgggcgcctcaggtcttcccagcagcccttctccatcagcctcctcaaggagttcccacaagtcctcacacacagccatgtcagaacccacctgtgagtaccattccatggacgggtaaatatggggccatcagaccaggggcacagagtcacacagagtcccagactgagttgggtcaggccacctttacccagaatgcacagggtgtaaaacaaaacaaaacaaaaacaccatgaccaaaaagtcaactgtggaggagggggtttatttcctattacagttgtagtgtgtcatccagggacatcatcagggcagacactcaaagcagcacctgatgtggaagctgtggaggaagagtgctgctgactggcttgttccttgtggcttgttcagcctgccatccaggaccaccagcccaggggtggcccccacctacatcacatcatcaatcaagaaaatgtaccacaggtttgcccataggccaatctggtggaggcattttctcaattgatgttcccgcttctaaaatgactctagcctatgtcaagttgtggtaagagctaggccaggacactgttccctgtctgtgttctgagcatgacagagtgggtgacattcaggtcagactatgtgaggtgtttgaacagggtggtggttggaccaaatgatagaaatggagcattaggacaacttgtatgtcccctgcctgcttcctggttgggcgtttatggtttggcttaagctctgcatagagatctcaacctcaggcctttgtcttttcttccgctgaggtagctgggaagtgtctgtgaatcagaaaaaccatctctccttttcttacagccactccaaccaagctgatggctgagaacagcaccacagctttgccaagaccggccaccctaccccaggagttaccagtgcaggggctcagccaggcagccacaatgccggtgtgtgggggaccacatcttctcagtggggggagtgctgccctgtgacgtgggacatgggaacacactgagtcttctcggagaataggttctactttgggatggaggtgaccagaggggtaggcagggagggcaggtattgcaggcaggggtcgtgacgtcactgcatttgcttagcaactaatgttagacatcttaccacaaaatgagcatggatatgtacttgaagaatacagaattcaagtgattttaagaatagtactcggtgcttcaatcatgagggtgggtgtctcccaagcctcttgggggccctcctgcttaaatctcatttcacctgtggctgtgaaaactggtgtcaggctacactgttgatatatgccaaacctctccataacaccacagagtgatggccctgtacaaagtcatcagcaggccatatgttgtcatggatggtggcctgctgtgcttctgtctcccccagatgttcaggggacacagcttgaagaggtcacaagagcacctggttggtgagcctgcagctgacatttctcacgcacacctcctccctgccgccttgcccccctcagtccgccattgctctcctgggtgacgctttctatgcaacctgcttttatagtccccagggactaggcacctatgaggatcacttcagaggagtcttcctcctaatcccctaaaaacacttaatagcccacgagactagcagttgtcctctctcctatttctccgagttgttccccagcatccacccaagtgatcaggaaatgctcaatgacagcatcctcagaatgagtaccttggtcctgcaggaaggagtctgtcgaggaaggggcagcagaaggaaagaggagctgccgagcacaggcagacagcagtggccttgcctagcgcacgcaccaccacgtagtggtagggatcgtgcactctcagagcacctgaaacccgctcaagagccgcatggctcttccaccagccatgagtcgctcctaactacatgtcttgcacagaaatcagtgcagccaggaaatagaggtctggaactttctgaaagtcttcatcctaggacttgcagctggaacacggaacctacagaaagccctgcccagagcagctcagaagcggctgtttaacaaaagtcctattctctcctcccctccccagactgctctgcattcctcagcctcctgcgacctcacaaagcaactcctgctgcagagcctgcctcagaccggcttgcagagtccacctgctccagtgacacaggtgagtcagagacaggacagagaagaggtgttttctgggctgctgaatcttctcacgcagctgtgtagtgcacatgcatgtatcagctaaggccctaggtgggggattttaccacaaagtcaacaggagacgtgtaacaatgtatcacacctgtcctcaacagccacaggggtcttctcccgcttcatgttctttccccatgtctgacagtcatcttcatatagtcatctctatcattgtatttgtctgtcttcctttcatttcaaagaactccaaactttagtatctagaagctactaatccattactataaatatcacggtccttgaaaaaagtgcattacagctctgcttccactaagtgattccttactagtttcaacaacactctgtgggttcttgtttgggtttgggtcagttcaggagcaaggcattggagatgcagggatgccggtagtttgcagagctgtggggagaagcgggcatataaccagagaaactgccctcacggggccactttctgggggaggtgctccttgtgttggcccagaagagtggctaggaaactggtagatgaatggataatagaaaaaaagacttacatgtgagttttagaggagagctatgtaactcggcctggcacaggacaagaggctgagcatcgggccgcccactcttgtcctggggaggagtgcacaggttcacgtgtatgtgctatggagcccagagctctgacgtcagctccttcatgggcatttggcattgtcccagtctctggccccaagttatacctggatcccagatggctgttcaccagaacctcatcctctccacgtttggctgtctctctctgtgcagatctgagatggctgatgggaacattttggaacatatgccctcgtagaagtggtctcggatgctttcctggaataagaaagacgtgtgttagcatatgcttcttgctagcgtctggcttgagcagtgatatcaaagctgttcagccagtctcctaattaaaatagtccatctttagcctcatgggggaagaaatcggaatagtggttttccttttcaagtccttgagacacttttggtaggaaattagtgatttgtttcaatccaaagaaacaagaaatgagactcccttttgcttctgggccttacatctaaaaaaaagaacaaaaataaaaacaaaaggttcataatgcctaatggtaggaaattctaatttttcatgtcttaaaacttacttaataataactgttcttggtctatagtatgctctatacctgataacaactgcatttctttaagatttattttttattcttgcatgtgtgtgtgtgtgtgtgtgtgtgtgtgttgtgtttatgtgcaccatgtgcatacaagtgcccgcagaggccgcagagcattagatcccttggaggcaaagttaagggacagttgtgagctaccacatagatggctgagccagggtcctctgcaagagcatcaaatactcttaatgctaagccatctactcagccctaactactgtattctttaagaaattctcatataatgaatggcttatgccagtggcatccttgaggcaagcatcaggcagcgattgtgtccttccccatagctctatgctgcttgagcctgtgagacagacagtgagcctggggggcggtgggtaagaagaccttgatagatccaggcccagtaggagagcaccaggttccgatttagggtgacagaggggcttgctgtcatcattagcacaaggaacgctggctagacaccttgtcacttcagagccgaacagtcgttttctcagagatcctgagaacagcgaccaagggacaggaaagaagtatttaagactgatctgaatgctggcaaaggtggtctcaggctgaaataactctttgatttgaatttttttttacttccttttgaagttttcagcacaattcagcatgttccagaccattaaagaccaactggagcagaggacacggatcctgcaggccaacattcggtggcagcaggaagagcttcataagatccaggaacaactctgcctggtccaggactccaacgtccaggtaatgtgcctgtgcagactggcctctgttctccttagcattcactcctgttcagtcaggactttaccctcaagtccctaggtattgcctcacagaacccagtgtgcttaggaagtatgcagacctaaagtctgccttgagagccctaagcatttgcagccaccctaggcaagacagaaggagcagaaaggacacttcaagaaaatcaccacaggactatccctgcccatccccctatgacactgactcgttagcatccactggcagcacctatgagagaagaacaatgctgcaaactaagaagctgtttcatgacaagagttacattatgaccgtgtggtttccttggatgaccccagagccctctctccggaggtctgctcagctctgctgggacgcacaggggacatcagttctgccttctgatcctgtccttcctgcccctgcatagcacacttactagatgggacacccaatgcatacccaggcagaagcccgggcatccctttttgtattcctgtaagaattactcagcaaactacacaaaagtccttcttcgctttccctgctgcggtgactccccagtgtggacactggaagacgcctagcagtcgcatgaatttaaaagcatggctgccaaaatgtcgaattcacaaaacgccacttgttaccactcttcccagagtgcgatatgtttttcctcacagatccgtaacccagtcagtagctttgaacttgtctcgttttgattactttaatggggttttatactgacgggaagggggtgaggaattgaagcagaaagtgctaaaaagcaaggtgggcgtctgaacaccctccagagtgctggagctttctgcttcctgcctgcgccacctcagagcgagattttaaaataacaggcaataatgttattgcttttgctcccagttgtaaagggtgtgatgtgtccccatcaggggtacattttgtgaacccccaacacatagattatgctgaagtacatatatatgtatctgagtccgtcaaacagccatgaaaacacagccctcctgtgcatgccttccctgtggaaatcaagtgttctactgcaccccacacacaccctgtacataccaggccctacagtttgtgcgtctctgtggcgaagtagggccttcagtctgcacacctccctaagaagccaggctctcaggtgctcatgttcctatgcaatgtaaaatctccattgcacacagccccgtgtgggagccaagccccccacccgcccccagtgcacacctcccttgcagaatctatgtcccagtgtgtgctagtgagttcttttagaattaggctgcgaggaagttctctgagatgtttgatgtttgctctggggcaaaggtgaaaggtgcacaggagccaagctgagctgaggcactacagtcgagagaaagtggcctccttagcctacagcttctgcatggaaaccacgccctcagtgtgtacatctccccagtggattctaagtcctcattgtacagctgcctatagatgctacaccctcgggatacagctccctgtgcatgccaagctgttggatgcacagctcccagtggaagctaaaccccctggtgcacagctcccctgtgaatgctaacccccaccccatcccacccccatgactacctgccctgtggatgcttaaccccctggtgcatagctcccctacagatgctaaacacacacacacacatgaatacctgccctgtgggtgctaacccccctggtgcacagctcccctgtagatgccaagccttatctgtgtttattcctctgcacttatcttcaaagtggaattttccaaaaagaacacggagatccacagacaatcaaaccagagaacgtctcctccccgaagcctggcttcttgtttttcacaagacttaaatacatcctaaaaactcctaccaaaatgtgatccttgaaaaaagaaaaaaaaactgattcaactgtaaaaatttaagcaagtggaaattattctagcctccccagcctttccccagccccccacaccccctaatcccccttccccatccttacttctgcacacacaccaccagagaggaaagacaagagataaggatgacacattggcagtttgccgaagccgggcaatgatgccgtattgtaccgacttttttgtagtgtctccatattagtgatttctgtgtgtcctgtaatgacaccaatgaggtgtaaagtctgcaggtgtgaatagtggaaaagtatatttaagtgggatctatttgttctagcatacgtttcttacttgttttgagggactgtcttgttttctgtttgcgtgttttctataaccttttgaggtcggcttttgagaaatccaagaaattcttcgctgttggtaaaacggaggcacagacatgtatgcccagatgcaaaccaggattccctacccagccagggtcgtttactgcagttcagtgggcttacttcattggttcagaactgaagtgtgcgctagtgcagtcttttaaaattaggttaggaggaagttctctgggatatttgatgtttgctcccaggtgaaggtgtgctgaggtcctcccggtcacgagagagtggcctcgtgcttttttgagcacgtgtgccctctgctggttattcaaatgaatgcctataaggacacctgcagccgtagtaagtaacatgttccttgattggctctttgagacagccatcattctagcctagcagccagccagccagctgtccagatatgtatgtctcactcgttggagcactgggagaggaggaggataaagacaacaggttttttattccttagaggccacacacagttgggacagcataacatatcaaaccattagctccatgacaagagcagagacagtttgagcaagaagtttcattcttttgtttgtttgtctgagtgtttttccattcactcctttagcagatctctgtacccacagtcaaaaggggaagatctctttctctcactttaagaataatgccacaatgtagcgctccttccacatttgtttcaccttacctacttaacatgtgctgacttcatgactctttcctggacagttttatgttgatttgacacaagcaaaagccatctgaaaaaagggaacctcagttgagaagatgcctccataagatcaggctgtaggcaagcccttcttaattagtgattgatggaggagggctcagccccttgtagttgaggctactccaaggctggaagccctgggttctcaaggaacacaggctgggcacaccatgaggagcaagccagtaagcagcaccactccgtggccactatagctcctgcctcctattctgtctgagttcctgtcctgacttccttcgttgatgaacagtgacgtggaagcataagccagataaactcttaatcccagcttgcagttggccgtggtgtttcatcacagcaatgctatggggtagcaggatgtgggtactgctgtgacggagctgagcgtgcggttttggaaggatcgtggaaggactttgggatttgggattagaaaagtcattgagtcttcaaagcttgatgggctattctgcgggagcttccgaggtgagaatgttgagagacgtgcagggggtggaggcctgacttgtgaggtttcggggagaagcaaggactctacagggccttttgagtggagagtctgtggtgtcccgtcagctggagctgaaaacttggctgtgattaacaagaggccagaaacagtaaagtgaaaactttgttgctggaatgctggatgctggtcagctgggactgagaaattggcagtgattaggaagagagcagcagcagtgaggtgaaatcctctgggaagtgtttcctgagtctctctctctctctctctctctctctctcacatacacacacatacacacacatatacacacatacacatacacacacacatgcacacacaagcttgttccagaggtggccaaggttgtaccttacacagtcagctaaacttggtagtttaagagtcacccagctgatactggttttaaaggcatgaggggtcatcgtgagcagctgaggcttgccactgtgagaagccaggagaagccattggtgaaggtacagcctccatagcagatgaaggcccaggatagaagggggtcatgcagagaactcgaggcttggcaccatgaagcaagcctatgagaggccatggtgaaagtgcagcctcagtagcagtttaaggcttagggtgaaagggctcgtgtagggaagttaaggcttgctctgggccatggtgtattatcgcagcaatagtaaccataactagcacagtcaatattataagaatggggaaaccaaatcactgggaaagttatcaatattgaccaagattattctcagtggtgggactgcatgcagaactcagtgcgtcttctttgaggcaaactataatgcctgccacaatgaatcttgcattaatttgacccttggtcagcaagcaagctatatcctgcccaaaggaatatagcaattggcttgaacatgagtttttgccgaagctgagagatcctgtttaacccacatactgttccgaaagcttacgctaagggacagctggagtcatataaaacactgtccctcgagggtgcgggtactgaatctgagatgtgggaaacccagaaattcttcttgctaggcttcttcccacactcctgtaacctgagcatttgggatgcagatctctgggagttcaaagccagcctgatcgacatagggctacatagtaggactctgtctcggtgttttccaatggggtcttaggtggctccggggagttggtcagggcccacaggttgagaaccactgctttaaaataatcaagagccttcatttcacagctgtaggtttctgggttaggatgaggtatgaaagattgttggagaggatgagacatccggtccaaaccctgaaacacagcaccacccccaccaccaccccctaccaccacccccacccccgctgaccttggcatcattggcttgtggctcaggttcatctatgaatggaacatggggtgagctggcctctgggtgctcctcacagtatgtgcagagtgcaggttcatccctgcctccccacatctcctgtggcgttcagggaacatgagcctgctgccctcaggtgggcacatggttgtgctgccctggttagaaactgtaactaaatctaccacgtgccacaaaggaagagcctccctctgcaaagaccgcagagttgggagcttagaatgggtcaggtacaacaggagccatgatacagactatcagcgcatgtttccaatgcccaagagttttggctaaaagaaatatttgcatgcttttggttaagttattactaagattattaaagttgttccttcaacatttagactcaatttgtaaatcgtatttttttttcctacttgcaactctaattgggccttaagacagcacttggtgcattttgcttggtgcattttctttttaagccacatccaattagtttatatggtgaacaaactgtggataatccacattaatgaacaaagccaatggcaatgtaatatttcaaaatctgaagctttcagacaccccatatactcaatacagaaaacataaaagtcaaaaaaaatcagttacttaactatttaaaacacttaactatttaaaatgaaatttagtagcacttcgggtgtccaatgagactgattccagaatctccagagatactaaaatatacagatttcaagacctttttataatacaacatggcattgcacaaaacaggtccacatccccctgtattctttaaaccgagtctgtccaatccacagcctatattgtgaactctcaaggtcagcacaatgttgtttggggggggggaagtatttgtaacttgattgcatggtttttgaactctatagatgacaacatcccatcccctcaaaataacaggccaccattattcgacatctttacgtagcctaagacaattcgtttttgtccagtatggcctggatacgctaaaaggttgtgacctctgctttgaatcatctctagattgtttgtatacctccaacagtgtgtgtgctaagtaagtacttagtataacacatatgtttaggaaatattgacaaaaggcaatctatagttggcacagaagaaatcctcttccaagtggttttgatctgagtctagagagagaaccccccagacatgaggatcaaccttgtgtggtacaaactgtttgaactaaatcagagtcctcacaaatatttcagcattttcttgaactaataaaggtacccgcagccttaactgtctaagacagcttatgtaacaaatcatgattataaaaccaagtgtgactttaaggcatgtgggtgatagatcattctctgctcttatttctctatctggaaggctgagtcaccttctcaaaggaagcagggctgtcccatctcctcaagtcctgggttgaagttgcctaggagcactgtgggtacaaaccctggtcactgggcagagatttcaggttgggcataagacccagtcccactctgagtataccatgagccatacggcgccatgccaccattaggatattatcggatcgttctgttcctaggatgcgtctcctcacccttctaatatgacacagatgaggcaacttgaactttggaaggatatcggtctgtgcgaagaaagccgagatgtaagactctttggtcaagttgaagtcacctcactgtggtcctcaggaaggcagagacaatgtctgcctggcccagccacttatatctagtatgctggctcgtgcgggctgcagcataagcgcacacctcctgctgctcagtcagggaattgcttttagttgtgtcgaggatcccgggtgtttttcctcctctctgggatgaagcgacaatgggatttcacaggcatttctcttctgtccttagatgtttctgcagcagccagctgtgtccctgagcttcagcagtacgcagcgaccagcagctcagcagcagctgcagcaaaggcccgccgcaccgtctcagccccagcttgtggtcaacactccactgcaggggcagatcacatccacccaagtcacaaaccagcacctgctccgagaatcgaatgtgatatccgcccaggtacagtacccacttctgcttcctgtccttcccactagggtagacacgctcttacagctaagatgtacttggctccggcagatgtcaaattctagaaacctaaacgcccttctccggactagggaaagaatacagtggtaggctttttctttaattattactgtaaagccatttttgaaggttcaatttgtattctctcctgcactttgtactgggagaagcggcgctgatggttaaagctagatactcgaacagagcagagtaaggtcctaagcccctgcttcttggacatcgcagtacagcgggcagatcgctgcttctctagcagccttcgcgtccacacagctcctagggcaccagtgagtatctgttccctgggagcatcaatggaagaggagtgttgtggacctcactgtgctccttatcagtacagaatccgggaactgggtcatctagtggacagataaataaaggcttcctccagatccacaggggatagcgtgaacccactcttggagcccaaaacttgaggagattcgattcccttgcattaaatggtacagcatttacacaagacgtgtgtgttccaatataatttatttacttactcatttagtgacgctgggggttcagactcaggacttctcccatgccgtggaagcactgtaccccggtgctacactccagaccccctaatactttaattcattttagatgtttgtttgttaattttatgtgtaggggtgttttacctgcatgtatgtctacgcgctatgggcctggtgcccacagaagacacgagagggtatcagataccctggacatggatttacaggtggttgtgagccaccatgtaagtgctgggaattgctcttcctctggaagagcagccagtgctcttaaatgagccatctctttagccctctagatgatttacacaccccatactgcaccagtgctggggaaatagttgtcatctagggatgatgagaacagctgtgaatgatcaatatgtgtctttttcaaatacttttattggttattgaaatgataaatctgtgtagcaggaagcttagtccatctttatgcaaattaagaatttggcctaaaaacatggccttttaatctgacaaggtcatcaaaacaaaacaaacatctgaaggctgggagtagcccacggggctctggaaaagcaaactgaggcagagttaattcagataccaaaagatgttgtgaatgtcaaaatctaaaaccttgagttgtcattgtaggaacggcccatcagtatcacagacaaaaccagaaaatcggggccaggccaccccctcgttcactcgtgatttgagtcagcagatatttgctgaaggctccctgcatggccagcactgagagaaccgtgaatgggaaagaaaaccctcagctccaatggggagaacagaggggaaaaaatgtgtgcacatcagagaatgtcagagggtggggtgggaacggtgcgcagatgagttgaagatttaagatgatcagaagaggtctccctgagaggactgtatctcagcaaagcccacagcgggtggtgagagtcagctggatcagcatcaagtggaggaaagattggctggcatgtgcaaaggtcctgaggccgacaggtccagcgaggagcagaaacagcaaagagctctttgnnnnnnnnnnnnnnnnnnnnnnnnnnnnnnnnnnnnnnnnnnnnnnnnnnnnnnnnnnnnnnnnnnnnnnnnnnnnnnnnnnnnnnnnnnnnnnnnnnnnnnnnnnnnnnnnnnnnnnnnnnnnnnnnnnnnnnnnnnnnnnnnnnnnnnnnnnnnnnnnnnnnnnnnnnnnnnnnnnnnnnnnnnnnnnnnnnnnnnnnnnnnnnnnnnnnnnnnnnnnnnnnnnnnnnnnnnnnnnnnnnnnnnnnnnnnnnnnnnnnnnnnnnnnnnnnnnnnnnnnnnnnnnnnnnnnnnnnnnnnnnntccctccttccctccctccctccctccctccctctctctctctctctctctctctctcatgttaaatgatattccagggtccaaagccaatgagaagttcccagctgctgcctgccagcggccgttcactgagcagcctgccatcccagtttagcagtacagcttccgtgctcccgcctggcctgagcctcaccacgattgctcccacccctcaggatgacagccagtgccagcccagccctgacttcggccatgatcggcagctcaggtatgatgctaggctgttgaaaggacaggaaggggtcacttgccctttcccttcatctctccattctgcacagcaaacgtccaaggcttcccagttggtctcagctgaggaggtagcaaggaagaccttgggatcctgaaggtcatgggcatgacccattgtgtggctcaattgcctttgagaggcacagtttgggtgctgttctagtttcgtttatgtttctgtaataaaatcctctaacaagcaggaaattgggtgaagacggcattttattcagcttacaatttcaggttaatattcattattgcggggaaagtcaaggcaggaacttcaaatatcgagtcacattacatccacagtcaagagcaaagcaaagtgcatgctcgctttcctcgcttgtgctcggcttgagtacactacccttacacatttcacgagccctgcctagagaatggtgctgcccacagtgggccggcccttcctgcagtgattaagacagtctcccccaggatatgcccacaggccaacacagtaagacagtctctcatatgcccataggccaacacacaacacagtatagacaatccctcactgagactatcttccaggtgattccagactgtgtcaaggtgacagtgagaactggccatctcaagtcctgactacaatgtcttgatctctctctctctctctctctctctctctctctctctctctctctctctctctctctctctctctctctcaaaggctgttgctgagccagcccatccagcctatgatgcctgggtcctgcgatgccaggcagccctcagaagtcagcagaactggacggcaagtcaagtaggtgggaatggggcggacacctgggtggagtggtctgagcctggccctttcattttcttaaaatgatgctccaggagctgatgtttctgacaatagtactccaagctttcgggttcactgtggatgttctacaaaaagcaggatcaagccttcagaggggctttccctgtgctttcctttcactgatgttcatgtaaatagataaaaacctgacctctactcttccacactccaaacaggagctgagggagagagtgacacctcccaggctgtagtcatccttgggctttttaaaagatacagatcccaacgccttcatccgagctaacatccgaatagacatgaccccttcgtcttccttggggctcgctcccttcagctggttctttacaaatggaatgcactgggattccctgccccatgcctctggcactgtaacccaagaccaggagacgcaccaaatttgacctccctcccctctccaagatacagcctcctcccacatttctggcccagggcattttctgttgttataactgggtaatctatgaaggttttctatgcctcctggttctagataatgggaaggctaagcagatggtactggcgtctgtccagcatctggtgagatccttcttgctgcatcatgacatgggggaagggagagcagtgttctgagttctcctattctttttataaaaccattactatcctcatgggggccccaccctaatgacctcatccagtcctgattacttcccaaagccccacccaaaaataccataaacaaggagcttggaagctaggttgccatctaacacatgggctttggggaacatactcaagccagagtatcccccagtctccccccagtctctcttcctcctatccatactgaggggtagatatgcacagctttaattagtattgcaccggggttactggagacatggggtaaatcatttaaatgctgctagaaagtaggctttaaaaaaatagcctctgggtttctattttcctcctctttcaagacaggattctctggccttggccttagtgtgctgggatatccggtgggttctctaccacacccagcctttagaagggaggctatcacatgatccttcttggtgtaagcactgtttgagtttatcaggacactgctagctaacggagcatgctgtgcaaagcctccctgagaattctttctctgcccgctgcagtccgtaatagcataactgagcagttcctaagctcgtgggagtacttacgaagattcccttttctcccaataaaaaatctatagcttagggatgcttcctttctccccttcagccagtggagagtctgggctttaagagaatcaggtccagaaggccacacgttacctgtggcagagtcatgggctcaatggctccagagcacaaaaccccttggttctggatcttcaagacaacttgttagcctaagttatctctaggctgaaaggggtctcctttctgttgtctctgtcctattaatacttggcctcctcgctttgcccctgtttgagaacgcgcacagtcatggatcctgtgggaagccatctttaaaatcccctgcttctgttctcaattaggcaggcgggtttggattttggttttgaattttgcttgttcttcctaaatgttccaagtaagtggaaagaaagatgcttgttacctcagtttccagagatgcttaatcctgctaggaatgaggcaaaacccacaatattttccccaccagcagctgtaactgctatttttggtcaaaccaatcattgctatgctactgtctcttccagacatgacctaacagctctgttctccagaggatatcaagagctgtctctcatatacacacagaggtctctgtagggaaagtctggaagccccaaagcctgttacagatgacctcatacagggaaatgccatcactaaaacacaaacccagaagggaattcgctataatgtctttgaacattaccctgttcttccagaccttcccataaagaccatctgtcttagttagggtcttactgctgtgaacagacaccatgaccaatgcaagtattttaaggacaacatttaattggggctggcttacaggttcagaggttcagtccattatcatcaaggtgggaacatggcagcatccagacaggcatggtgcagataggatgagggtcttaaagtccacacccacagtgacacacctactccaacaaggccacaccttctaatagtgtaccccctgggccaagcatatacaagccatcacaccatccatagtttcttgataatggaccatggtcaacatcttattgtgttattactgctattgtaataaaatatacataatgtaacatttgttatataacacataatatataacatctgccatcataaccattgaagtacacagtacagctgcatccagtgcatctgaggtgttccccaaccttccatttccagagctcctcatctccctagactgaaagcgtaccctagctccagcccctcccccaacagctcctgaaagtcaccatccctctctctgcctttccgtgactttggctatttgagcaccttgtacagtgtttgccctttagtgtcttcaggtttccctcctagcttgtgtcagtgctaggtggtgctgtgttccattgtatgggtgtgttcatcagtggacccttgacttcattctgccttctggctattattgtgaatgatatttctatgggtatgcaaatatctatttgagcacatacatttacttcttttgaatatataaccagaagtggaatgcctggatcatacagaaattctatttttgtttcaattttttttttagttagcatatgaattaatgggatttgttgtgaaatctccttacatctgtgtgttcttattcgtcctctaatttcccggcctgtcctccatccacaccctcttgctggttcatgtccactccaccaagtaggttctgcatagaaactttttaggatcatgcgatcccatttatccattctggggttatttcctgtggtccctttcagacagtacttgctcatgcctgtatctttaaatgttttcctcccatatccagcgttccagtgctcctaataacgatctttgatcagttttaaatttattttactcaaggtgaagaatatagatctagttccttcctctacttgtgaaaaaaagaatctagctttgccagaactgttgtttgaggatgctgccctttgtccagtgtttaatttgtgacacatttgttgaagactcagttggcttggttgtgtgtgtttatatctgtctcctgtgtttcctttgctccacatgtttctctgccagtgaaatgctgttctttgttactttggcactatagtgtaatttgaagtcaggttttgtggtgcttccatgatagctcttccggtaaggactattttggctattttgggtcttttgtgtctcatattaatctgtggacattttttctatttctaagaacaacactggaatttttatggtgattgtgttgaatctgtagatcagttctgataatatggccaatataacaatgctaactttcaaattttcccatgagtgtgggaaggtttttttcttttcttctagtaccatgttgaacttctttcttcagtgtcttaaaatttccattgtagacgtctctcagcttcttgattagtttcatcactagtcacttttaatgatttgaaattattttatgtaagcattttaaagttatgaatggggttcctctctgatttctttcttgacaaacacatttttttgcatgtagaaaaagtgctcatctttcttttttctttttctttttcttttttttttttttttttttttttttttttttttgatgattttgtgtctcttactttgctgaccatatttctgagagccaagagttttctggtagaatcttcaaatcaaatggctgcatcacccgcacattgggataatttcacttcaattttcctacttatatccctttaatttctttcttatttccccagcaggacttcaaacacttggctgaatgagagttttaacccttgtctcatttcttatttgaggggaaatcctttccattcgtcttatacagcataatgtgggctgtagggtttccatacagacctttattaaattatgctataagcctttaattcctaactccttcatgaagtaatgttgaactttctcaaaggcctttttgtttctattaaaaaaaagagcatgttgggggctggagagatggctcagaagctaagagtactgtctgctcttctggaggacctgagttcaattcccagcaaccacatggtggctcacaaccatctataatgagatctggtgccctcttctggcctgcaggcacacatgcaggcagaacactaaatacataataaataaatctcttttaaaagagcatgtatttttttgtcctctagtatacttgtgtgttatattacatttattgatttgcctaagttgaaccactcttggtcacggcatatgatcttcttaaggtgttcttgaaacagttcacaagaattttattgagaatatatgatctgtatttatcagagcaattaacccacagttctttctctgttctctctctctctctctctctctctctctctctctctctctctctcacacacacacacacacacacacacacacacacacacacagggcgggagggaaggggaggggaggagatgggaagagagagagggagagggagagggagagggaagagggagagagagagagagagagagagagagagagagagagaaagacctggtttagtatcaggtagtactggcttcctagactgaactcgagtaatgctccttccctttgcattcttatgaaacagttggagtagcactgactctctctcttctctaaagactcaggtagaggtcagcagtgaacacacttgatcctgggattttcttcattaggatgctgttaattgctgcttcggtcttgttgacagctgtggatctatctatattgtttatatacacttgatttaattttggtaggccacatgcttgtataaatctatctatttcttctagatttttccaggattataggcattatcctctggatgtaattgaagtctattttaacactcctaacaccccccctttcctctctaacttgattgatttactctctctctctctctctctctctcctctctctcatcaatcgtgttcatcatttctaagagcccacttgtgttgactggtcctaggttcttttagtctccattgcagaaggttctgtcctaatcttgattacctcttgctacctcctgcctctggttttagcttgctcttctttttctaagacactgaggtgcatcattaggatattcgtgggaaatctctggatttttaatgtcatcactcatagccataaactttcctcttagaatggccttacctatacctcaaagactggtaagttctacttttattttcatttaattatggaatgttttacctctcctttcttcagcaacccagccaccaatcacccatgagtgttttattcagtctccaagtacttgccattcctagaaattctgttgctattgatcgctagcttttccattatggtcttttaaataccagaaattgttctaattattttgcatacttgcttgatggcctatagtgtgcgttctgttttaaagaagactccataagctccagagaaatatatgaataccacatatgttggataacatagttcatctatgatatggtgttttgggcttgctcatttgttttgagctaggtctcattatgtagccctggatggcctagaactctaaagatctacctgcctctgcctcccaagtgctgtgattaaaagcttccatcaccacaaccagcccatggtgtaattcttttgtttggtttggtttggtttggtttttcgagacagggtttctctgtatagccctggctgtcctggaactcattttgtagaccaggatggcctcgaactcagaaatctgcctgcctctgcctcccgagtgctgggattaaaggcgtatgccaccaccgcccagctggtgtaattcttaagatgtgtatgtgtgtgtgtgtgtgtgtgtgtgtgtgtgtgtgtgtgtgtgtgtgtgttagtgtgtgtgtgtgtgttagtgtgtgtgtgtgtgtgtgtgtgtgtgtgtgtgtgatggtgtatcccacctgtccacagtgcctgcagaggatcccctgaattctttgatctggagtagcaggcacttgtgagccactcatgggtgctgggaacctaattagtgtcctctgtaatagcagcagaagctgttaactactgatctatctctccatcctgtgtagtttagttgtagaacttcttcattggattttagtatatatgacatatctgaaaatggaaatgaagtattgaagtcacccattattactgcatgaggacacagccaacctttaatgcctactagtatttgtttgatgaaactgggggtcccagcatttggtatctgtatttatgactgctatgtcttcttaataaattgttccctttgttaatacatggtgacctttttatttcttctaattttgatttgaagactctccgctatcagaggagctacagcagcttgttttcaccttttccacgctcaccagattaacctttttccatgctcagcctgtgcatgtcttggctagagaggtagatttcttggaatcgacaacaagttggatcttttttccccctgcaagcagctaatctatatctcattattggtggaattgtggttgtttctgtttggttggatgattgttcttttttttctctttctttctttctttctttctttctttctttctttctttctttctctctctttctgtctgtctatctgtctgtctgtctgtctttcttttatggtttttttttgggggggggtgttgagacagggtttctctgtgttgccctggctgtcctggaactcactctgtagaccaggctggcctcgaactcagaagtctgcctgcctctgcctcccgaatgctgggattaaaggtgtgcgccaccacacctctgctgttcttttctatactattaagctttgctgatctgctttgctgaacatgatagactccttcttgacgctcctgcattcatcccctcctctcagaaaatctatcctttcattggctctcctgactaagtccatctgtcttccttcttctctgcccacattcctttagtatcttttgcagtgctggctcagacattgtgatggttggctttaagtacccatttgatgcatcctataataaccttagaaaattgtctcaatgaggaattgtctaccttgggttggcctgggcatgtttgtgggagactgtcttaattgtataaactgatgtgagaagacattgtgcactctgggtcttcttaacggagttctgagctgtgtgagagtagaaaagcccagttagatacagcaagcacacagctaaacacacatgcatttatttccttgcactctgagctatggatgtgctgtgaccagctgtcccaagctcctgtcacttgacccccttaagtgctggactgtagcctggaattattaactgataaatcctttctcctcatacttgctttttggtccctgtattttatcatagcaacaggattcaaagcagtgctgtagtcttcctcttaggattttttaaaaaagatttatttatttattttactttattttatttattttacagtatgtaagtacactgtagctatcttcaggtgcaccagatcccattacagagggttgtgagccaccatgtggttgctgggaattgaactcatgatctctggaagagcaatcagtgctcttaaccactgagccatctctccagccctggtgcagtaaccatgaatctccttagtttgtttttaccttgaaatggccttaattatccatcagtgtaaaaagactgactgactggattttggaatgttggttgagagatatgtagcttaaggactttgccctgtgctttccccgcagctgaccccttggatgtggatgctggaaactgaacttggctcctctagaaaaacagcaagctttcttatccactgaccatctttccacagcccaggaagctcactcttaagggttcaatccctgtatgacttaaaggggaggaaacccacttctataatagcaatatcaccacactaacatcggttaatcccactaatacatctccaaacatcacaaaacagaaaatttcacaaaacaaaaatagagtgttttctgaagttaaaaatgacttgctgcaaatttggaaatagtaatgactgagaaaaagaaaggagatggggctgggggaggggggcaaggagaaaatagaggacagccagggataagtaaagaaaatgaagggaaagtggaggatggagggagtaggggaggagctgggggaggcgtgactgggaggagagggaggccattacttgagatataaagcaaataaattaattaattaaagaaaaaatctacccagaatctatttaaaaaagaaaaaaaaacaaaaacaaaagagaaaggggagggaagaggaggggagggaagggagaggagaagagaggaaaaggggaggggagagagagggagctgggaaccttctttctgggtcttcaagagcaagaaactgccaatgtgtgcacgcgttcatgaggcagaggtgtcagaacttgtgtgtcactggtctctataacaaatgtccaatgtccaccaaggtggtcctactttagaggtttctcttcttcgtgtacaggagcgggggagggtgtctccattctccatgcttagctctgtgtcctccagagactttccagactgtccgtctctgggtaggcggctgttctattggggaggagtctcccaagtacattaaaaatcagcaggtgaacctcagtcctgggggccgtccacacgaaggacatcaaggattctccagcagataggtggctccaggctgatccatccgggccctgcttcttcaaccccagggtacttctctgcagataaggtgtgctcctgaccacagagtccaaggctgccgtaccccgtgctcttcactgcctgagccagaccctgagtctctggccacctggccacttcagttcctcagtacctggcctctcttgttctctgtaattgccttcccgatatctctctggctctgggattatgggaggttaaattcaggctccctgacttaatggattttccatttggggggacctccaggatggcctcagttttcggcagtaagttccctgtcaagaatggacccagccatggccctctgagtccacagaatgacaagatggacgtccttttcactactgaatgctccacttgaggaatcacagcctcaccaaaacctgtaactggatctggggctcctgagagctgtggacttgtactgaaggcaggatttgcagtcctagaaagtccatcagctctaggatgggctttctgcttccccatggtctacctcagagccccgctgttcaaacctggcttacccctgtctctttcccctcattcttcagctgtttctcactgcccatgaatttctaaagctctttcttaggagtaggctgtgttagcctgttctgactcttctccctcaccaggtcacacgaaggcagcttttagtctaacatcttacccagaaatcccgtgtttaagtttttgagaaactaccataatggtttccagcatggccttaccaccttacatttgcaccggcagcacacaaaactgtttttacacatccttgctaacaagggcattttcctcttcttcagtatgtgtcaatatctatacagtacatgtatgtatgtctttatcataacggtgtgaagtgttaactcacttcagctttgattggcattcctcctatcgactagtcacaaattcacgtgcttactggcctttctatctttccgttggatgaaaaggactgctcaagggggctggtgagatggctcagcagttaagaacactggctgctcttccagaggtcctgagttcaattttcagcaaccacatggtggttcacaacctgctcaagccatttgcccattactttgggttcttttgtgtgtgtgtgtgtgtgtgtgtgtgtgtgtgtgtataagtaaactgtagctgtcttcagacacaccagaagagagcatcagatctcatcacagatggttgtgagccaccatgtggttgctaggatttgaactcaggacctctggaagaacagtcagtgctcttaacctctgagccatttctccagccctactttgggttctttgggcattaatgggatgttggtgatagagctgtagatgttagtgaaggtttttgtgtttgtttgtgtttgtttgttttttaatatttgtttgttttatgtacatgggtgtttggcctgtgtctgtagaagctaaaagaaggtgtcaaagcctgtgatgatttgtatatgcttggcgcagggagtggcactataaggaggtgtggccctgttggagtaggtgtgtcactgtggatgtgggcttaagatcctcatcctagcttcctagaagtcagtattctgctagcagtcttcagatgaaggtgtagaactctcagctcctcctgcctggatactgccatgctcctgccttgataataatagactgaacctctgaacctctaagccagccccaattaaatgttgtccttataagagttgtcttggtcatggtgtctgttcacagcagtaaaaccttgattaagacagatgccctggaactgtagttgtaggcagttatccaccatgtgggtgctgagaaccaaacccaggtcttctggaagagctgttagtgttctcaaccactgatccctctctccagcccctgtagtactgggtcaggcatctctttctcagaggatctgttttatttgaaactaaacaggtatgcacagagccaagtgatgtttccaagtccagactcacaccctaccaacagcagcgcatccaccccggtcctgctcatggggcaggcagtactccatcccagcttccctgcttcccggccatcgccactgcagccagcacaggcacagcagcagccaccaccctatttgcaggtaggtgagctccgggagttggggggaggggggagcaggggcgggaacaggggcggggcaggggcggggcagggggcaggttgatgaaccacttgagttcagtgaacagaggctgagttccaaattcgacttttacagacattttcttccctagtagagagcaaccttggaaaagttcatatttggttaattttaatgcttaatgtacagtatgaaagttaagggtaggttaacattatgctccatatgctggtatgctggaaagatctattttaaaaataattctgttttgttttgttttgttttgtttttcgaaacagagtttctctgtgtagcagccctggctgtcctggaactcactcagtaaaccaggctggcctcaaactcagaaatccgcctgcctctgcctcccaagtgctgggattaaaggtgtgcgccaccatgcccagctaaaaataattcttatcagttgcacatcttgatacgctcataccttcaccaaaagaaagtcaaaaactaacgagtgtttttgtcaaactttttagtgcatagaagtatacaattaaaacacaactagttaaagatccatcaagccgttttagtaaatatgttaatgtgtgaaatagagactttacatggaaactggaggcgcagttcacagagaaagcagaaattagttcactggattatcaagcacaccagaagggggaagggtgggtgccagtggcctggggattcagatacgggccctgttccttcagggactctcaaagggttccattctccctcacacctgtctagggcactcccctagcgcatccgtgatcctgccttgtgagactttccctagactcacgggaccaccacctctgcagggcatctctgaagcctaaagacagcatgtgatgcctgagatggagagagtcagcatccttaaagatctggggtgccgtttgatgctaaagctgttaaactatctgtagtataatcttcaagtctccctggccacacccaccgtgatggtgggtgtcaactccaactttggctttgtagatcttgtcagtccccactcaggacagggaagtcatcgggcatggcaagcaatgaggcagagagacagagatggatgtgggaagaggagaggtctccatgtgacttcagcagccgcagtttgcaaacacctgctgcattcacgatgcaaagtaaagatgctagagtgcttcagcaaccgtggtgcccttgacatctcagagcacatgcatacatggaggtgggctgcacagcacagctgtgtgctccggccctagcggtgcacagagagaatggtagagaaaccttccttcctgaaggaaggctcagaggcatctctggcagaacccgaccatcaagaaaatactgagtttaagtgaaagagaagagatgagaggagggtgttttagcaggccagggataggtatgctgccaagtctccgaggtagtataggggcactaggatagtaacaagggacatttattgtaggcaagattggaaaataagagtgaaactgccaaagtcagactgactggttgactgatttgcatttccaatcaggaacttgtctttccaggttctggaaaaacggcagtatttgaagtagacacaggacctaatctaagagccatgcacgtgtgtgcagattcttccccacccataaattacatgggcctcaggctccaccatccacaaacacagaagactttacatagatggtgtgcttctgattcagcctcagtcccaagcccattgacccagaaggagcccccccccccttccccacccagagttgatgcacaagggtgcagtcagaaagcttggcttttccccatcatgcactcagacatgcactcaccagcacgcatgcctagcggtctgaggagggagtcccagaatctggcagcatctgctgcaaaccccaaaggtactgaagtaacttgaagagtagagggactggccagtcacgcagccccttttctgctctttcctgcgtacaggcaccaacatctctgcacagtgagcagccggactcgctccttctctccaccttctcccagcagccgggaaccctgggctatgcagccacacagtctacacctccgcaacccccacgcccctcccgcagggtcagccggctgtcagagtcctaaggtctccagcagccatcagggtaataccctgacactggagtccagacgcaaccagctttaaccaatggaaaacggggttggccgtgggagatgggatgaagcgtttacgtgattttggcgcaccctgtatacatttcagaactcctgatggtaacgtgtctggagtgtggcactggcagaatggggaaagaacaggaatattggccatgattcttttgccctgggcttcttgggcatccgctacagccataccagacaggaaccaagtgtccccgtgttggcaccgcttcctggtctatttgcagaggtggtacccctcgctgcctccaggagagagcgctccaggtactctaccgactgagacaggtcccaagccctaacaggccttcactctcttgatagtctttcctttacagtcaaggactacgttaaaggtctctggagagagtataaagagattatttttcatcgtttttaaaaggttttgttttaatttgcacacctgtgcacaagggaaataacttaggcactttcggagtttgtgtttgttttgttttgtttaataaggtcccatggcttctttgggaatccacgataagaaaaacaaccccaccaatcagatagcggagcctgttatttgaagctgcagagccacacccttggcctaacccctagcagactgaggctctcccatgcctaccagggggtgttttccttcctaaacagaacactggattcttcctgttaacttcaccgagagtagctacaaaggtggacttagagccaagcacaatctcacaacgattccagaattccctagagacctcttggggggcaacgggcaggctgcatctcccaggaaaccaggcaagggcccgccatcctagtgaggcaggccaccgcacctttccacttctcttccccatgattccgaagattggattttccttttcaggatgcactttgctttttttttttttttttttgtatgttttgttatgtcgaggtatttctaaagagaagattttatataattataagaggaagtgtagtgaattgtacagctgttgtaataatgacctatttctataaaaaaataaaattgtacggattatgtgtaaattattttgtatctgagataccagttccattcccacatatgaaagtataaaggtttccttgtgtttttctgtgagtgaacattttgtaataaattaacaagtttgtacaatttccttggtcccttgttgtacatcgacacatatatctcttttctgggaaaccttaacattttttgagctgttgaaaacttcagaggtaaagtccttagtctgttttccgttgctgtgataaagtaagtgcggcggagaagtcagagaaacgggctcagagttccagagagttcacatggtcacgtggcactgttgctctgggcctgtggttgcctccaacgtcatcgaatgagttcatggcagaaaaggtctgctcatttcaggactatcaggaagcaaagaaagagtaaggggcagggatgccaataaaggaataccactaacagcctaactttgttccagcagctccacattctatcaggctacacccagtagctgaggtccagggtttcagcacatgggtctttgggggccgtgcaagacccaaacttcagtatggcagaagctcaaacaataactggaatactggaatggaaagcttgtttgtttgtttgttttcttttttccgagacagggtttcactgtatagccctggctgtcctggaactcactctgtggaccagactggccttgaactcagaaattcgcctgcctctgactcccccgtgctggtactaaaggcgtgcaccagagaaagcctgtctcgaaaaaccggagggggggggtggtggggggaggcgtgcgccaccactgctcgacaaatggaattttttgaactgcattattctgccagttccctaaggcttaaagcttgtgacagaaaagcaatgctttgttgaagaaatgatgacaaaataataacaggaaaaagttgctgggaacatctcaatcttgtagacataggtagcctgcagaaatgatggagacgctccccaccaaagcatccattcattgtttgcaattgctttcaatcaggacagatccgaaggactcccactaccagcatgaagaccaatgataccagcaaggtaggtgtgcctgtgtgtgatatgtgcacacatatgcagcacagcgggatgtctaggtctcagtcagcttcagccaccttgttcatgatggtcagcatactaaaatgagggtgcgccagaggtcctggcggtctcgactgagtgcttctaagttcttgttctcttgttcaaacaattgaaagaagtatacacaaatagtgaattagcaagggtctaattcaaaaaatagagtaaacatccagactggatgcattgctatgaaagcagtaagctccaagcaagattgccctgggttagccgggcgtggtggcacatgcctttaatcccagcacttgggaaacagaggcaggaggatttcttagttcgaggccaaccttgtctacaaagtgagttccaggacagccagggctatacagagaaaccctgtttattgtgcaaagcttcctcttatgggaccaggaggaggaggggttagttgccaaggatgagatgtaggtgattctgtgattccattgaagggcttgggttatgtaaccctttgttcattcaacatgttctttatcatgatatgtttcatcttactcatatgcatgtccaatcatgcccaggcatggttggtaaataggagattcccacccccaccccccccaaaagttcactcaatggacacaggctgccttactgcccatatactgaagaccagcccaggctgagttgggctcacctcctgcagttctttttttttttttttctttcgagacagggtttctctgtgtagccctggctgtcctggaactcactctgtagaccaggctggccttgaactcagaaatccacctgcctctgcctcccaagtgctgggactaaagatgtgcaccaccactgcccggcctgcagttctaagatatgttccagcaagttcaaccacaaaaggggagtcaccagaggttgctagggagttagttgagggtataagaattgactagccactttgtttggagaaggttgtgcacggaactccgtgcagatgcatgtcccagggtgctaagctgcctctgaaaactacccactttaggagctcatggtttaggagccacctagatgctggctgcatgaagctaaagttccttctagggctctattaagatagacaggtctgtaatttctcctcttctgtaaaatgatgatggctccttcttggttctctagctaggatccattttggataccatgaggttgctatagatatgtacccttgattgctctatcctgagggtgggggtggagtgggcaggaaatatttttcattcaccaagaggaacatttggaaagaacttgaaatgaaccctaaaaacatgaagtctgtatggaactctgacctatttttttctcttacactagcattgtctaagggttagagattgggtttttctggaaacaaacttatagtttaattgtagtcatactttaattgatggttagactcctaagtggaacaagattgttaatggacacagtgtattcattctcctaaggctgttatctggaagtcattaaaagagggtggagtatgctgtgctcctaatttaatttaactctgcctgaattgtgcacatgttcagaatttgggttcgctcaaaaacctataattgtgtaattttccactaaatgcatgcatcatgggaattgtaatcactgacctcttcattcattatctttgcttattaaaaggtcattctgtaactacatctgtgtcccagaaaaaccatgatcatactgtctggaaaagtacagtgtcttggctcaagagtcaagattgaatgtgacctcagtttaagatactacaaacaaactaaaattgtaacaccttctgtctctaacaactaaaatccccttgtacaaacaacattgttgtcattgttagacaaggtatcactatgtagctctggctggcttggaactccctatatagatcaggctgttctgcaacttacagagctccacctgcctctgcctcccactgtggaattaaaagtgtgtgccaccacacctggcgaagtgaagcagttcctagtcatgactttgcactcttgccaaaatgtcctagtaaaaatttagcgatataaaatggctttaatttctgttcatgttgtagcttgacgatctcaaagtcagccagtaatatactgaaaaaaatctaatctgagtcatctagagaaatgctattagtgctcagatggacttcatattatggagataaatagccttgcttttctgtagaaaagctcattagaaatgaggcaggggaattttttttcctttttgattttttagcttaatcatgtgtggacggatatgtctagtttattgactccttaaattattcatgttttacttttagtatgaagtcaggaactcacagccttttataaactcagcttttctaattaaccattatttattaaccataactaattatcatttcttgctcaagtcagcacactctgactagtgggctcctctgtcttcttgctaaagatcccaaattcacattttcatattctctttatagcccttcctccctctccctccctcagtctctactctccccttccctctctcctccccttactcttggatctagtctcattgtgtagccaagactggcctctgtgtagtccgtccttaatttggcatcctcttgctctgcctcctgaatgcatcgctccagacttccttttaaattatttttgagtggctctgcttgggagattgcgttgcaattttctgagctcaaccccagtaccaatcagcactcccatagaaccccttctggtttggattctctaagaactagaaccgagcctgtctgctcctttcctcctagccccactgagaagtcatcagatattgtcaagcgtgtttagcccactacagtcaaggatatctcgaactcctgatcacctaactcaacccacaaagttctgggatcacaggtgtgcaccaccacacgtggctgtggacactattttcttaagagagagagagcagttgcctgtccaccccaagtctgacctttggggaatccaaaggccccagcatcccttagccaaaggaggcagagacataggttccttgtaagatcgtggagtttctgcctgcctgtcttcttgcctgtgagatcctgaaacttgctcattgctgaaactccaatagacaggctattcggacatgtttagattcggagatctattttctacggacgtgcctggcatttccgtgggcattttcgacttggaaaataaattcttttgttgtcgtctcggtcattccggggaccttccgccaagcacagtatctaatagattcaacaaacgtagagtgagtgagcgagtgcacgcgaaaaactgaagagcatcttccctcccggccgggcactccgaatccgggttcgggttgggatttaaatcccatcccgcaccaccactgctcaaggcagattgcaagaagactgacaagatcgaccccgccccacccccgccccatgccgctcgctccgcccctgacgcgcgctgtatttacgtcccagcctaactcctaacttccctcgccacacctcttcctcctcgcctccccgtgacccggaagttgtacggctacgcgactttccctcccacaaaccctcgcgcccttcctttcctacttgggcccggcagagtgagtatggctgcggggtcgcggctctgaaatccggcgccatccgcgcccggcgcgggacgggcaggctcggtggggtttgtcccgcgccgcgcggaggctctgcggtccggggcggtgggaggacggcctgcggggtacgggtgcaccttagctcgggcttgggctttcccactacctgcttagagcctccctccctgtcgcctgcgtctagatggctcccgcaaagaagggtggcgagaagaagaagggccgttctgccatcaacgaggtggtgacccgagaatacaccatcaacattcacaagcgcatccatggagtgtgagtaccgggcgggcggtgtggcccgcgacccccttcgggctccggccgggctgggctgtcacccgcgagccttgcttacagactgggtgctctagagggcaagcgggtttattccggtgtggttgtgtgtacgtggaaggtgtgcggggtttggcttgcacggcaaccggctaggaaatggagactggaggctgtgatggagtttgagggagcggttagacttggggaaggttggtggtgctaaaacgtgagttctggtaatccggacgtgtaaaaggaaagtcagtgacttgtacgctgcaggaaagtggccggttactacctcaagtgcgaaatacgattttttttttcgtcgtccgattatacagatttgtgcaaattcggggcaagttgtagtaaagtggcggttacagagagtgattgcggtccttatttgtacacgacctatctgcatttgcgttccagccctagagcttgagttcttggacttgatggtttagtattttcggagagattttgccgggttgaaatgtgtgtctgcacctagtgggttgccccaaggtctttgcccggtatgaatactgctggtggtcggccacgttccttcctctatggttgggcatattaagcactatgaagcactatttaggcctgtgacaaagtgaaagtaggccacaagttaaaggtggtgtgggtgttgcccagtatgtggaaggaagagtcgctctcaggtgaaaggtactctttaaaagcagccttgaatagagcattgtagaagcgagtcgtaccccccccccaggccttttgtattttgttgataaggccctatgtgagaatctctagcctccttcattctttggtaatttcttggtccccattgtggtgtaaaccaagcctctgctttgttccactccttgctttccctgtctcattcattcgggtagtagttgagcccagtgctaggtctgccctctgagatctactcactgactgcggcagccccactttttccaattccctaaccataacattgagattgctcagtgctccatctctttcctggtctttgtaagtgataccacctgactggttgcttgcgtgagtttttttcaagctagctgtgaagtgggttgtctgggcactagagacaggctgcgggtaggtagaatagagaaagcagatgctctttgtctcacttggagtggacttgacgggtgttgaacagacctgggcttttttggttgattggtttttggatttgaggtcttcccgcccagcctccatgttgggatcattggtgcgtgcaccatgctctagaaaggttcaagttttttgttttttaatagccctctatcatgtaccctggctatattcataggagagtgcctgcctcaattccacagaactttgtcttccttttgtatgagtgttttgcctgaatgcttgtatgctccacattggtgctggaatcaaacctaggtcatctgcaagagcagatatttttaaccgctggatcatcaggaccatcattcaggattgctgtgagcaggcctggttggtgactgatactctgggaaagtgagcgggacatcttgaactataggatgcttggaatttacccctacatcttaagtactgatgctagtagctggacatttcatgcttggccagagggttcttcgtttcatgatggcatgccatttacatatataatttttgactttttttttaatgtgcttgtgttctgaaccttaggggcttcaagaagcgtgctcctcgggcactcaaagaaattcggaagtttgccatgaaggaaatggggacaccagatgtgcgcattgacaccaggctcaataaagccgtctgggccaagggaataaggtactgaagttacttggtgcagtgatgacagcttatccaattccttatatagtgtgtgtgtgtcacatttgagagttcagttagcagatgtagggtagaaaagatactgggacaatgcctcaggctaagcttgtgtcttctgttgtaagggagacagcagtattggaagagctccattggctgcaggaaaaagcagtgctttagagcctaaggtgttggcctccctgggaaggagtgttctgctgcccagaagggttgatatatgtcatgtcctgtagcctataaggggattaacaccgaggttggggagtcccttgaaagtggattaagtaagatggggcagggtacagctgctatcataagcatacggtttgaggtgtattagattatccaacagagaactgcagtatctgccttgaggtgcggtgagtggtgttacacgagagcatggagaagtttgtagagatctggggcctaaataagcacctagcagctccaaagattacgaaggaaggagataagtcagctatgtggcttctgaagggggagggttgtgtgtaccttttatttgaattaatggctattatctgttggcagtcactttctgtctgcttaagaataattggttactgttggtgactgccttgacatcctaacaggcctgacacatcctgagactggcctgttgctcattcacctgggtgttttcaaggtcatagaggcttgtttgccagaacacaaggaacagggatagatgtgagaaactgccttgtttctgacggaagcattgaccttagcaacacatttttattaggaacgttccatatcgcatccgagtacgcttgtccagaaaacgtaatgaggatgaggattccccaaacaagctctacacgctggtaacttacgtgcctgttaccacattcaaaagtaagtatcccagcgttccgcaggagttattgtatgtgagatgatgtgtgtcttaactatgttcagtgaagaggtaagcagcaggttaaattatcagatgttccttaaaaactaactggctgggggaagatagtacagaggttgctgggaagggcggcacaggccatgggttgtgcagtggcctccagctggggcaggatgcgtgggtgctgactggctgttactctccttccagatctacagacggtcaacgtggatgagaactaacctgctcgtgtcaaataaagttgcagaactgccttcagggtttggttttcctttctgttgtctgcctcatgggtggaatttttgggtctacagggtgttggaaattaatctgagaatctctgttctgggtacatgggaaattagaaatacgtgaaacattcttttcacagaagtcactttattaggatttgggttggttttgaaagagggtttcttgtgtgtggcactgcttgttgtatagactagggtggccttgaactcagaaatccacctgccttttcctccctagtattggcaattaaatgcccagcttgtttgtaagctctcattttcagttccaggtgtatgtgtgagcctaagattaggtaaagattgaggttataacttaaacgtactgaattaacttatgttgtgtgggtcccaggaattgaacctgggatgtcaactctgcctttccagccatctttgccaaccagtagctcatctctgggatgtgtctgccctcaaaatgacatttttaaaaagtcagtacaaaagaacgatttttattaaaaaccttggggacaaacattaaaggcatggtttgaacatgtttttgtaagggcatataaagtgaatacgagatatattaaatggtttcaattaccagcattgaaacaaaattagtgcaaaaaaaagccaaatacagttgtacaggcaatggttctgggatctcttgtttctgaccagtggaaacatgagcctggggttggtgtctcttagttacggtggcatctttttcttcatcaaagggcagactcactatcaggatcacaacagaaacactggtctcagcaaagttgatagtcacagtgtatgtaaac

SEQ ID NO: 610 - DNA, 2664 bp, Mus musculus
tttagcaggcaagactgcatagaaactctaatggacgaagatgagaaggatagagcaaagagagcctctcgaaataagtctgagaagaagcgtcgggaccagttcaatgttctcatcaaagagctcagctccatgctccctggtaacactcggaaaatggacaaaaccaccgtgctggagaaggtcatcggattcttgcagaaacacaatgaagtctcagcacaaacagaaatctgtgacatccagcaggactggaagccatcattcctcagtaacgaagaattcacccagctgatgttggaggcattagatggcttcgtcatcgtcgtgacaacagacggcagcatcatctatgtgtccgacagtatcacacctctccttggacatttaccggcggatgtcatggatcagaacttgttaaatttccttccagagcaagaacattccgaagtttataaaatcctttcctcccatatgcttgtgacggattccccctccccagaattcctaaaatctgacaacgatttagagttttattgccatcttctcagaggcagcttgaacccaaaggaatttccaacttacgaatatataaaatttgtaggaaattttcgctcttacaacaatgtgcctagcccctcctgtaatggctttgacaacaccctttcaagaccctgccatgtacccctaggaaaggacgtctgcttcatcgccaccgtgcgcctggcaaccccgcagttcttaaaggcaagaaatgtgtgtagctgacgaacctttagaggaattcacttcgaggcatagcttggaatggaaatttttatttctggatcacagagctcctccaatcataggatacctgccctttgaagtacttggcacctcaggctacgactactaccacattgatgacctggagctcctggccaggtgccaccagcatctgatgcagtttggcaaagggaagtcgtgctgttaccggtttctaaccaaagggcagcagtggatttggttgcaaacccactactacatcacctaccaccaatggaactccaagcctgagttcatcgtatgcacacactcagtggtcagttacgcagatgttcgagtggaaaggagacaggagctggctctggaagacccacccacagaggccatgcacccctctgcagtgaaggaaaaggactcaagcctagagcctccacagccctttaatgcacttgacatgggcgcctcaggtcttcccagcagcccttctccatcagcctcctcaaggagttcccacaagtcctcacacacagccatgtcagaacccacctccactccaaccaagctgatggctgagaacagcaccacagctttgccaagaccggccaccctaccccaggagttaccagtgcaggggctcagccaggcagccacaatgccgactgctctgcattcctcagcctcctgcgacctcacaaagcaactcctgctgcagagcctgcctcagaccggcttgcagagtccacctgctccagtgacacagttttcagcacaattcagcatgttccagaccattaaagaccaactggagcagaggacacggatcctgcaggccaacattcggtggcagcaggaagagcttcataagatccaggaacaactctgcctggtccaggactccaacgtccagatgtttctgcagcagccagctgtgtccctgagcttcagcagtacgcagcgaccagcagctcagcagcagctgcagcaaaggcccgccgcaccgtctcagccccagcttgtggtcaacactccactgcaggggcagatcacatccacccaagtcacaaaccagcacctgctccgagaatcgaatgtgatatccgcccagggtccaaagccaatgagaagttcccagctgctgcctgccagcggccgttcactgagcagcctgccatcccagtttagcagtacagcttccgtgctcccgcctggcctgagcctcaccacgattgctcccacccctcaggatgacagccagtgccagcccagccctgacttcggccatgatcggcagctcaggctgttgctgagccagcccatccagcctatgatgcctgggtcctgcgatgccaggcagccctcagaagtcagcagaactggacggcaagtcaagtatgcacagagccaagtgatgtttccaagtccagactcacaccctaccaacagcagcgcatccaccccggtcctgctcatggggcaggcagtactccatcccagcttccctgcttcccggccatcgccactgcagccagcacaggcacagcagcagccaccaccctatttgcaggcaccaacatctctgcacagtgagcagccggactcgctccttctctccaccttctcccagcagccgggaaccctgggctatgcagccacacagtctacacctccgcaacccccacgcccctcccgcagggtcagccggctgtcagagtcctaaggtctccagcagccatcagggtaataccctgacactggagtccagacgcaaccagctttaaccaatggaaaacggggttggccgtgggagatgggatgaagcgtttacgtgattttggcgcaccctgtatacatttcagaactcctgatggtaacgtgtctggagtgtggcactggcag

SEQ ID NO: 611 - protein, 579 aa, Mus musculus
RQEMCVADEPLEEFTSRHSLEWKFLFLDHRAPPIIGYLPFEVLGTSGYDYYHIDDLELLARCHQHLMQFGKGKSCCYRFLTKGQQWIWLQTHYYITYHQWNSKPEFIVCTHSVVSYADVRVERRQELALEDPPTEAMHPSAVKEKDSSLEPPQPFNALDMGASGLPSSPSPSASSRSSHKSSHTAMSEPTSTPTKLMAENSTTALPRPATLPQELPVQGLSQAATMPTALHSSASCDLTKQLLLQSLPQTGLQSPPAPVTQFSAQFSMFQTIKDQLEQRTRILQANIRWQQEELHKIQEQLCLVQDSNVQMFLQQPAVSLSFSSTQRPAAQQQLQQRPAAPSQPQLVVNTPLQGQITSTQVTNQHLLRESNVISAQGPKPMRSSQLLPASGRSLSSLPSQFSSTASVLPPGLSLTTIAPTPQDDSQCQPSPDFGHDRQLRLLLSQPIQPMMPGSCDARQPSEVSRTGRQVKYAQSQVMFPSPDSHPTNSSASTPVLLMGQAVLHPSFPASRPSPLQPAQAQQQPPPYLQAPTSLHSEQPDSLLLSTFSQQPGTLGYAATQSTPPQPPRPSRRVSRLSES

SEQ ID NO: 612 - DNA, 196063 bp, Homo sapiens
  misc_feature (1)...(196063): n = A,T,C or G
cagatgagagagactttggaaaagaaccacagggctgggctctccccagagagaaagagaagagcaagagactaaagatagaaccttggagacgtgctcacttatggggcagcaggaagaagcaaaagaagaagaaggggagcggcatgaggaggaggagaaggataggtcaggcctgggcgtgaaggaagcatgacgttggaaggatgaacaaggcttcaagaaggaagagttggttatattttccatttttcggttaataactttattcagacataactcacataccatacaattaacctgtgtaaagtgtacaacccaatggttttcagcgtgttcacagtcatgcaaacttcaccgcaatcaattttgggacattttcattaccccctaaagccccataccctttatccattacattccaagtccccatgtccccagaaataggcaacgaaaatctactctctgttttatagatttgcctactctagactttcatataaaaggaatcctcaattattgaatttgtcttcttttgtgactgccttctttcacttaatgttttcaagacccattcgtgtggtggcacgttatctgtacttcattcctttttatggccaaataatattctaatgtatagatataccacattttgcttatctgttcatcaactgacagacatttgggctgtttccagtttttggctattacaaataatgctgttatgaacacttgtccaagtttttgtgtggacatttgttttcatttcttttgggtacatatctaggactggaatggcctaatcacatggtaactatgtttaactttttgaacagctgtcctctggttttccaagggactgcaccgttttacactcctaccagcagtgtataagggtttcaatttctccacatcctcgtcaacactagtcattttcaattttttaaaatttattaacctaatgaatgtgaagtggtatctcatgttgattttaattcacatttccttcatgactcataatgttgagcatctttccatgtgctttttggccaagtgtatactttctatacactatagataagtctattcagatcttttgcctattttaaaattagattatttgtctttcattactgagttataagagttttataattgcagatacaagtcccttatcggatacatgctttgcaaatattttctcccactttatgggttgtcttttcactttctagatagtatcatcacaagttgtcacttctgatgaagtctaatgtatctttttctttggttgcttgtgcttttggtgttatacaagagtcctttgccaattttagaatcctttgccaaattcaaggtcatgatgctttaccacctacattttcttcctggcgattttatcattttaactcttatatttatgcagttgatccatttgagttaatttttgaacatgatgcaaggtagagatccaacttcatttgtgtcttgatatccagtcccaggactatttgtttgttagaaagactactcttggctgggcatggaggctcacgcctgtaatcccagtactctgggaggccgaggcaggcagatcacctgaggtcaggagttcaaaaccagcctgaccaacaaggtgaaaccccatctctactaaaactacaaaaattagccgggcatagtggcgtgtgcctgtaattccagctattagggaggctgaggcaggagaattgcttgaacctaggaagtggatgttgcagcgagctgagatcacaccattgcactccagcctggacaatatggcatgactctgtctcaaaaaaaaaaaaaaaaagaaaagaaaagaaaagaagacaagactactccttccccattgaattgtcttggtacttttgtcaaaatcaattgaccataaatgtaagggtgtatttctgtgctctcattctattaccttaatgttttacacttgtcatccatgtcctatgccaattttttatttttatgttacagtacagacatctacttcttgacttggtgacccaagttagtgtcatttcccttagactaccagctccagtgagttcaaacaatgcctacagaacttgctttgcactgtggcaggcacagcccctgcagttcataaatctgctgtacattacagggggagttacattacagggagttacaggatgcctgtaactcagtgtcccaccctgccggcttccgcttatctgacagccacatcaagccaactggttcatcacacaccctgaagtcagaaggttgtggctcaacactatgttttagactcgaccaaactgtactctgatgaggagctaatgagaaagagatcaacgataggatgatcatatgttaaagtactcatgtccatggagcagggagggagggagagacagtgagagcaagagagagaagaaatgaccaggagacactgagagaaagggaagggaccaaggaattgagaaacggggagaagaattgaggaaggcttatttaaaattcttatcaatcacttgactaagtatcccctcaagatagcataactgtaggctgctcaaagcacaggtgtgggtggcagagaggcccacgtgtccaacctggctctgctccctgccagccatgttgccttatgcaagtaactccacatctctaggcctccattccatcatctgtcaaatcggataataagaaaattgccctcagggggtaggcgtgaagattaaataagttaatgctcttagcccagggcctggcacaggaagatcaatacaattagtgcaaaccacaggagagttgaataaccccctactagcctcatcaccaactgtataaaccagtggacctcgaatgaacttcatgtgcattggaatctccagaaaggttgtttgacagagattgctgggctggcaccccagggtttcaggttccgcaggtctggggtagtgcttctaaatttgcatttctaacaagttcacaggtgacactgatgctgttcttccaaagaacatactttgaagaccactactctgaattatgaagggtcaggaaaacaaaatgccacttattggcattttaaattctcaagtgaaaagtctttaaataaaagccctaataactgatcccggatataggcaccctgaaccatctggaactcactaatagaaagaaaaggtgactttaattaccaatttctggaatgtaaaaatacaatcaagcctagttgccacgataaaagtgtcctttaaagcctttatttgactggaaaggaagaaatctgaagcaacatgtaatagcacatgtgcattaacaacatcaaatgaggttgtctttaccatggaatcgtgttcactgtccacacaagtgctcaactggggccattgagaaaagcttttttctcaccaaaatcttgcaacaaaacatactaataaaacaatgcttacccatacaggaaatgcgttgtctgctgtctacttgggaggggctataaatagctccttggagaacattgttctataattagctttcacttcaagtgaactatgtgtaatgaatttcatatcactagatgttcttcctgggcaaagtatatggcagattatgcatctgttaatgttgaaactgaacaaacggcattgcacggaagtcagagaatttttaaatgagacagagatggaaaccacactatgaaattgactggaagtgcccatttggggtgtatgtgctcttacaaacagacgtgtgcaaacacattaaattacctcttcatagttgagttaaacaggcaggtgttgagagcaactaaagacaatggctgcttgagcctccatacagctgtttcttggccctattcttaaagggtgttccttgcactttttagaaaagtgcaaatctcaaatttgtttgagtctccacgaaggagggccagggcaaacacctgaaagagctgaaatggatttttctacattcaatgcactttagttccaattccacagtgacttctgaaatcctctcagctaattgcaggagctaaacaacacctcccattcttctggtacatttacagttcccccacatttgctgccctcgcaccttcctccccccacaactcccagcaccctgctacacaaaagacttttcttcattctattttccacatgctctgaaatcagtgtcccttctgcattccataggttccctcttgatggctgtttggctaggatggggtcatttaaatgcctccctggagcactcagaatttgcgctgaccattgaaaaatgttcctgttccagtgagaaaggctccatccccggccactaccttaaccagcaggatgaccggaggtaacagctgagcaaagcccctgccttgggctgacctgcactggtcccatattcttgggccaagatgagcatgcctgacctgcacccaaactttccatttaatgagaggaacttgcatcctttcccaacctgaagcccagagctggtttgaagattgcatatgtttacaaaagaacactcccatccagtctgttgccaaagtccaaacagtgcccttggtgagatgccagtaggccaataacccatgtatcgacccactgacttcatttccttatatgaatgatcaggacctagtattgctcttttgccaatccaatcctttatcctggaattctatttcaagcacttggaagacagctgctttaagaatggagtaaagatattaataactgatgcactgatgggaggatgagagaaaacagagacaagaagtgtgtaacactgctttggtatcagttcattacccagcaagatctcatggggagtgaatgatgccgtgaatatctttgtgttggcattggatgtggcgatgtgctgggctgggtgggagaaagcccgggcttggcagtcatcagggtcagtttcaagtcctgctctgtcttgcatttgccaagggactgagggcaccttgagcctctaagtcagattccttatctgccaactggaaataattaaacactttttttgtacaggaccttatgaagatgaaatgaggtaatgtaaataccttggcatataagtattagataaatgtcaccttttattcctgaaaacattattaagtaaaatatcatttaaaaattctcttatccagatgatggaatagtattcaatgcttttaaaaaaaagtgctatcaagccacaaaagacatgaaggaaccttaaatgcatactactaactgaaaggagccaatttgaaaaggtacgcaccatatgattccaactctatgacattccagagaaggtaaaactatggagacaataaaaagatcagtggctgccagtagttggggggaggaagggatgaataggcacagaatagaggatttttagggcagtggagctattctgtattatactattataccttaatggtggatttgtgtcattacacatttgaccaaacacaccaagagtgaaccctcatgtcaactatggactctaggtgattatgatgtgtcaatgtatacaacaaacctagcactgagggaggggatgctgatagtgggggaggctgtacatgggagggggggtgtatgggacctttctgtatttcctctcagttatttagagtcaaaagctgctcaaaacaataatgtctatttatgaaaatcctcttagaagtagataggatctaaaatcacactttattgttagagaaaatgtacatgaaagaacttcctcagcggggcttaagcataaggaaatattattctcaagtgccggtattggcaataatctcacctctttttcagatttgtgtatatgtttgtgctaaggctttagggctttgtcacctccagactcctccagccctgttttcctccctggctcctccacacggtctttgtaaggaaatcttacttcattctttagtttgccaaccacatgatctaataggcacaaaaaccaagttaagtcttaaccctaccaggcaggctgtacaaggccttgattgtctcctggtagcatcctctggcccaggcgggagggcgagagcctgctgcctcctgcgctcttctattctatgaagcttatgcagaaacagcacatcaaggtgctaaccttgatattgtttctttttttaattaattaattaatttttttttttttttgagagacggagtttcaccatgttgcccaggctggtctcgaacttctgagctcaagcaatttgcccacctcagcctcccaaagtgctggggattagacatgagccactgtcacggcctaatcttgatatttgaaacacatgataggcgttcctcagtcttgctttcaaaggtactcttcataagccctggcctctgagtcagtctccaattattgggttctaaagcctcttcttcacgtttatactgacccaacttccctttgccttggttgctacaattttcttctctagcataatgttattctatccaatgatgcgtggtattgtgttttttcttttgagttttgaagtgaaaactgataatcagaggtaagaatccacaaatgggcttctggacattcacatgaagaaagagggccttcccaccttgtgattaactagaaaaactgtgctaacatctggcatggaaccctgttcttattgtctgttccaaagcttatgctgaagtcattgaatgtatacatccaacaagagtcccaagccctgggctagtgctgtaattcgtatagcagcccacacattcttgcccttgtgtaataccacgaatgaacacccatagtcacccaatacatattttgaaaatttaatgtgtgcatatttaaaatgaggatatgccacagattcaacttctatgatggaaaagaatatccaatttgactgtgagaactttgaattatttcaccgatacctctaaagactgataaaattgactgcaaaaatttttttatcctcccttccatacatttggattctttgaaaaatatctggagttcctgaatacatcaaggcaacattcaatcagtaaagccatgttcttttaaaggcccaatgactggaactcagtgagaatgtcccaaaactggcaatgcagttttgaaatggctcttttgctccatgctgcacattttgaacaatgcatagatgatctattgtagcttggctttgttatttggttaacgaaaaatccaagcaccaatgtcacctcttccaagaagctcatcctgagtccttcctcggcacccatgggacatctgcttttggcttggagggcttttctgaccctagccctatttggctggtgtttatgcctgcctcaacatagtaaaccctttgtgtatagaaactgccttaatgttcccttgatccctcacaggccaagcccagcctgactcatggcaagccttcaacagatgtcagtaaaaggaactcaaccgtcaaatgcatagaatgaacatggggtcaactctcctccgtagctctcttccgcatgtgggggaaagggcctagtctaactggcttctgtgatgcagaatccactctgccttatggtcagataggatatgtggcctatcttagaggtatccttcccatctgggtgagattaacattaggacacgggatggagtttggaataaatacgacaaccacatacacgtcatctccaggactaaaaaggcagaaaccacatttagtaggggcatctactggacaacagagaaaaagagaccacagcaaaaacactttttgtactgcagaattatttgatgagttactactacaggacattccaggtttcctaaaagaaaatttaatgattgttcaacaagttcccaaaagggagtaggaaaagggagttggaatctcttccaaagcaaaaaaggaagggaggtgactttaaataatgctttaaaaccggttagaagtacacaatttcatcctttagtaatattagtcatggccacgctctaaaggcggggtgaaacctacttgcctggaggaaaaggacggggtagaaaaacaaagcaaaataaaatccatcaaacaaaagtttcttcttttggaaagggagggacttcaaaatcatgacaggccaaatgcctcctcctctttcttgaaaagccctccaagtcagaagcaagcctgagaataacagctgctcttaggatgctcaaagctccttgcagctgattatttttcaggaggagaattagacacaaataatacaagtgggaaataaagagaatgacctactttacagggggggtaaaaaggagctctgtgtgagcgttttgatctaattgacggtgtggggttgcatgcccaaataaggcgctgctggtcggatctgcgagggagagggcacgtctcaaactcgagggagaggacgagacagcgagaggaacagcgtccggggcgacccccagtccaccgcgggggcctggcgcgcttggggcaaaggccctaggagaccccttctggccacaaaatcgagtatgacagaaaagggccagcgggggcgctttccttccagggccacttgccggaatgtaagagggacggagagacgtccggaaaaggctgccacgctcggagcgctgcgccaggccaggcacctaggccaggggagcggagacctcgtgggagcgggcagggggacctttcccctctcccgggcttccacccaggcgcctccccgctgtgaacgccgccgcccaggtgaaggggaaaccggccacgtttccggacctcggcggggcacacggtctccggttttcaccggctctgtcttggagccccgaagggcatcagacagcagccccggcacccggggattattcctgtacctctgcctccctccgcttggcgtttgcgggaaccttggtaaaatcctccctgtttctcgcgcgcgcctctctctccagcttctttttcttggattctcgcctgtctcctcccacagaggaaaaaaaaaaaaaggtcacgtatgtttggaaaaatatgtaggtcagtggaacatttcctgcactggtgcaaaaggagaggagggcagcggaggaggggagggagaggcagagtggagctccaagtgcccgctcctggccgcagccccacaccccacgtgcccctgccggggaggggggcaattagccggttcctttccatccttgacccattttccggaccagctacgttcgccttaggacaggcactggttattcctccccagcagtcgctgctgtcctccgccgaccaccgctcgcccgcatcttccccgacccccgcctcccacctgcccccgggccgcacccccgccgctcattgagaaatcgcagtggtccccgcagagacgcgctttgtgccctgggtcgagacctgcgcgcaaccctgcccctggaggacagtgtggagggggtgacagtcgcgtgctcgtcccccttcatcccctgcgcgggacagcagggtggcggcccgcactgcgagggtctacactaggcgggggcggcagattccttgttccccccgagtgacaactttaatgggacctcggctggcagcctctagtccacttgcctctcctctgggccggctcacctggaagcacaacccccccctcccccaggccccggcgcccaaccccgaccctgcgccccaggcccgaccccgccgcgcgtccctggcagcccagcagaggctgcggcggcctggggactcgcgggtgtctgcgccgcccatggaagccgggggtctagggggccgggggtccgtctgcctgcggcgcgcgcggggtgcttgtcccaggctgggtcggggccaggagagaccccgcaggcggaggcaggcgaggggaggaggaggagggtgggggtaggagggggaggtggagagggaggagggtggagggaggaggcaggggaggaggcagaggcggaggcggctctccccgccggctctgcgtgcggaagagtttgccgcgcgagcagccggcctctcgcaggagccgagggacccgcgcggctgcggcccaggagcggcggccgcggagcccggagaccccgcagccgcggcggcggcggcggcggcggcagcagctagagcagcgcctcccgccgccgcccgggaggagctcgccgcgcccgctcgccgcctcgtctcccagcggcggcgggaggcgcgtctccccggcccagtccgcgcccggccccgcggggccgctccggcccgctccgaggtaaggggccgcgcctaggggcgcgggggacccagggtgggtagtacgtgcgcgcggggtcgcaggactcggtcacctgctcgccagcgtggaggacgcgcgggggcggaggggcgctcaggcgcgaggctgcgcggcaccggggaccccggacgcgggggcgcggagaggtgggttcccctccacagtcaggccgctgggggcttcgcgtcctgcaggaggtagcaatcgctgggccggtgggctccgggcgcgtctcgacgcagaagacagaggactgggcatccgagcctcggaatttgggggtcctcggggtgtccgacagggtggagaaggatcgtgccccagggcaacagctttggggattgcccgtggttgtcttcgagacccatcgcgctaccctccgaaacgtcgggcgtcctggacccccggagagtgcggcgtgcgcgccctgggcccgcggtctctcggagtccctgggtcggaattggttccgggccggattgggtgcggaatcggtgcccccaacccccgtgtgcgcagacagcgtgcagcctggctcctcacgtcgctgccgcccccccaccccaactccggagctccccaggttggatgtatgcgtatggttttgttgggagatgtgcccctttcccagccgaggagggacgcacctttgacctttctgaagagctgggcaggtcggtaaccagggaagggacaggcaccacccggctaaattcagaaccagtcccgctcctctgcttgccactccttaattgctcaaggtaagaaagtttgtttcagccctgtgattcataaataattagtaactagttttgttgattaagcaagatggaaaccttgaatatacgcacgcacttccacaaagtctaaacactcccgagcttgtgtccgggaggctttagtacggaaagttagaagccctggagttcaacaggtgttcaggagggtcccggagaggagtttcgtctttacgcgttgctttggcatccaccccaacttcattaaagtggttagcctgttttcctacaggtaaaacattgatcacttattaaattaacttaatcagcagagacgagctaaaccgtcttgatcatttagaacccaaaccttattttccttaatagaaaggtttttcctgtttgaacttcccaggtaattagttctaaagtagttcccagcaagacatctctgccagcatctctctctcactgtagcttggtccccatcagtgaattgaccaactaattatggcttgcattaaacacagagctgccctccttgggaggcactgttcacattcaagcgcacacactagctccatcttcctgccactaagatgtccttaaaggaaaaagttagccaaaaataacccccaaataaatagtgtaatgtttaaaagagttatcctgacctgcgccactattttataaaagcaaaaattcagtgtttcattacagcgctaaaccaggaccagtagaagtattggtatctctcagcagtctacttaaatatttagttaaaaataaagtgtgcaaagtaaagacgttcagtaattatcttccatctcacagagagatgtggagtatggcttagaagaattgtaaatgcgctgcttttagccgttttcttcttggaaatcgatgcctctatttatttgctgatctgtcccactgtgcgtaaatgtagaatcggttttattctcactgcttcccagaggggctcctgtggaggtgaaagaaggaaatacgttctagaggaaatatgttattaataaaacgttacccccaaagagttaaccacgccaaaaataaccaagtgaggctttactaattagtggtctgatgagagagtgttcagatgatgactaaagaattgatctttatgtagaaaacaacaattgtttttaagctcatttggttctcttaaaacagtttgggccctttaaaaaaatttctggctgtttaataatgcaaatgatgaaaatcgttaaagataacacatataacctgatgtgtgccatgtttaagttgaattcaccctatttttttgaacaatctttcttaactcttggtaatctttatagctcactcaacactgcaacttattagattaaaaactgaaagttaattttttcagaataaaataataaggcatgcgtatactttttaatttaaccatctttatatgttcattttttcagagtcttgcttttgaatcttaagaacccaaagggctaagtcttctttcttaatttttaaaacaagcatgtgttttgttctttacatgaatcgtcggttctcccagtgtgatcacgacactgtcccatgctgattccatgcacggtgcaactctttcccaagagaggtcagatttcgaggtgttgaaaatagcccagtgactcagtattcttggctgctttatgccaacggtttaattggctgcatcatagcaagcatctaattgagtttcacatttaaatagtggatagggtacttggtgcattatttgcttacagaagtgtctgattagcatgttcctgatcctcgttctatttgtagcaaagatgggaggtcagggactgtcacatttcatattccccacagcatctcatctcgatggggccttgttcagaatagatgctcagtaaataggtgtgggaaatgagctgaattgttggtggtcactatccaaaggtgagaaatttctgaatgctaatggggtacttaactatgagtaattctattttaaatctcaaggtgatgatgattaatagtatctcagggcactaaataaacatgtattaaatatgagcgtatgtttaaagggggagtttttaatgcagtctttaaggcacaactgcttctcacttgaattctttaactgagattaaggagtccttggcattttaagcaaagtcatttcttaggtaaagttcccccagagaccacttgaacttttgcaagtcttaaaacaatgggtggttccatttgatggttcagaatagaaaggagagtgttgatcctctacactggtatgaaaaaaactgtataaggagatggaggatgctggatatcatagtgcccgagaatcacctggggcccttgtcaaacacagattctaactcaggacacctgggagaggacccgagctgcatttctcacagctaccagatgctgcacgctggcaaggttttgggatgcactgaatccagttcagcatgtttactgagcatataccacatagagagcccagatgataaaaaaatgagaagatgggttgtacctgcccttgaggagctaacaaggtgaggtggcagggagagagagagggattgtaaactgaaaatgaggttctgggatgccattctctggggtggtggccagaaaggggcccaggaaaggagagttgctggtagggcttccacattgctgaccttgacctgtagtcatatttgaatggagagccttgtgacttggcaagaaataaaatgcagattttgaagtcagacagacctggggtagcctcccagctcagctatggcaacttttaacctgagactcagagtccttgtcagaaaaacagtgcaaatgatgcttaccttgccaagtttgtagaattaccagtaaaggacgcgtgttaggcctaacaaaagtgattgcttttattactgttgataggagagaggaggctggaaagcaaggaggacgaagaggttactaaaatatgttccatgtagttcaccaattagagattcaatttggtttaccagcaaacccaaggccggccgtggagaaccgggccagggctggagggcaggcagctgtggaagctaatcagaggcaaaatggaaaattattgggagcatgcttatctccaccctctcctgcagtccctggcttctggtttgctttgttgatagcccttcctaggatatttccatctgaagcttttcttggtacttaagctgtaggttctgttgatcaagactgctagtggcaatcaagcgctctttaaaaatgtagtggagaggacaaacacctctcctctttgaggggcattggtctattctgtggtgggtcactttccaggatcaaagccatcaatctgtctttccaccatagtacgagttacttgaaactagtgccgagcgtgttggaattcacctggggtgccttttatgctttgcactctaagatattgcttcctcctgccatctaggagagatggatattgcaaggcaatggtgtccttcaccctgatattaggaggggtcacctgggtggccctgaaaacacttcaaccaacatcactctgattttttaaaatatattttgggattccatttattatttgcaaaggcgatttctctgctaccatttgccttccacgctccctgaaagtaaatcttgaaaaccaagttctaagagaatggcaatggcagtttgatgtttagggggaaggaaaagcagaggaaccccctggagccaaggcaggcctgggtgagggtggagacgagagagggaaaggaaggcatcgtcaggcatgggagtaccaggatggaaatgggagcagtggtgggggctgaagctgagaggttggaccctaggactcaatttgtggactttgttgctttgctgaaggccgtggcagataatgttcccagaccactgaaaatcatccaggcttccagaaaacacaggcccatctaaagacagacaggtgacgaggtgacagaacctagtggcgtgattcttctagcctcttctgagccaaaaatgacatgcacaattttatgaatgatatttgtgccccttggtgataaaatattaagagctcgaggtcatctgaaaattattggttttttgtttataaaagtacatagtttttggaaaagatagaaaagaaggaaaaaaccccacaatttcaagatatattttccgttcagtgttttttctatgcattgaaatatttttatattagtttatcttaaaaagcacatggatataatcttgtaaaaattttcaaatagcacagaaccatttctagtagaaagaaaaaaaattcccttcatccttgtggcctacccataatcatcgccctatcttttatttgcctagcagaaactggattttgtacagtagactgccaacccacacctgcctctggaggtttatcagattggccactcaaccctggtgagggtggggctgctgcccttgccagtgactggctcagggtgagcatgcggaccctgttctagccaataaaatgtgagggtgggccactgggaggcttctgggaaagtttccctgctctcaaaagagacaaggaaggaaacagtcctttccttccactagatactgtgatatgtggccataatgcctgcaaactgggcagccatcagccaccagaggggctgggccaggtctcagctgacctgcggaagaatgcaaaggtgaagaagggcagggggcggggaggtctccgtggtgcccttgactttctgaattacacaaagaagagtctgtttttgaacatgtgtgagatcatgaaaccattaccagatgaagcaaactgagctagtttttctgttgtagccaaaagcatcccataactctccacctttctcaggaggtaatgactgataaccatggggcatgttctgctagtcatttttggcgcatttacatatacacacacatatgtacacttttaaaaactaaggccgggtgcactgactcacgcctgtaatcccagcactttgggaggccgaggcgggcggatcacgaggtcaggagttcgagacaatcctggccaacatggtgaaaccctgtctctactaaaaatataaaaattagctgggcatggtggcacatgtctgtaatcctggctactcaggaggctgaggcaggagaatcacttgaaccagcgagtcggaggttgaagtgagccaagatcctgccactgcactccagcctggcaacagagcaagactttgtctcaaaaaaataaaattaaactaaaaaataaaaacaaaaactgaactcattttatgtatattatttagcaacttaatatggcatggatttttaatgacatacctttttctttatttttaaaggctacagagtattattcagaagtacaaataggacgttatttaacccatccctattaataaataatctattgagttgactgttacagtttttgtattaacttccttatctgtatatctttatgtacatttcaagattttctaggtcagggattattaggcctgggtaaaggcacacctgtttgaaatattgatagatgctgccaaattgggggctaaaaaaagctatgcctgttaacctccccatctacagtgtgtaaggccgccttgtctccatatcttaactaacacaagatattttccagcttttaaatcttttttgtgcattttcacatgtttgaggtagtaccatttatagttttctattctgattgttttgacgtgaacataagcatttttccatgacataaacaatttaaattaaattttattggctacataatagttatacttgttttgggagtgtatcgatggtacatgaagacgcaaagggaaatatttgaaatagaggttgtctatgaaaattaagtggctatgatcgaccttgcagtaaacctgaaagattttctggaaatggtgttgggagacacacccctccagtgatatgtttccaagaaaaccctgaggagatgaccttccaggcctttctcaatccagtcagatggtaggctgccccaagcatttctaagaagctttgttgcttttagaatccatcagatttacagtcagacaggttctaaattcagttctctgaatgtacagtagttacgtaaacacttcgtacattgcatgagacagctgaaaagtaaatttgctgtattcttttaattttttcgacttttattttagattcaggggatacatgtgcaggtttgttacctgggtatattgcatgatactgaggtgtggggtatgaatgatcctatcacccaggtactgatgtagtacccaatagttaggttttcagtccttatcccctggctccctgctccctccagtagtcttcagtacctgttgttgccatctttatgtccacaagtacccaatgtttagctaccacttataagtgagaacatgcagtatttggttttctatttctgcattaattcacttaggataatggcctccagctgcatccacgttgctgtaaaggacatggcttcattctttttatggctgcatagtattccatagtatatatgtaacacattttctttatccagttcactgttgatgggcatctaggttgattccatgtccagtagacatggacatggaatcacgattgctattgtgaatagtgctgtgatgaacatgtgaatgcatatatctttttggtaaaatgatttgttttcttttggatagatactactatcagtagtgggatggctgggtcaaattagtagctctgttttaagttctttgagaaagctccaaactgcattccacagtggctgaactaatttacattccagtcaacagtgcattagtgttctcttgtctccacagtctctccagcatgtgttttttgactttttagtaatagccattctggctggtgtgagatggtaccttattgaggttttgatttgcatttatctgatgattagtgatatggagcatttttttcatgtttgtatgtcttcttttgagaagtgtctgttcatgtattttgcctatttttaaatatggtttttgttttttttgcttgttcagttgtttaagttccttatagattctggatattagacctttgttgaatgaatagtttgtaaatatgttctcccatttatgtaggttgtctgtttactctgttgataggttctttttctgtgcagaagctctttagtttaattaggtcccacttgttaatttttgtttttgttgcaatggcttttgaggactttctttcccaaggccagtgtccagactgatgtttcctaggcttttctctaggattcttatgattgaagtcttacatttaaatccttaattcatcttcagttaatttttgtatatggtgaaaggtaggggtccagtttcattcttctgcatatggctagctaaatatcctagccccatttactgaagagagagtcctttccccattgcttatttttgtcaactttgttgatgctcagatggctgcaggtgtgtggctttatttctgagtcctctcttctattccattggtatatgtgcctgtttttgtaccagtaccatgctgttttggttactgtagccttatagtatagttagaagttgggtaatatgatgtctccagcttcgttctttctgcttaggattcctttggctattcaagctcttttttggttccctatgaattttagaagagttttttctagttctgtgaaaaatgacattggttgtttgataggaatagcactgaatctgtagattgctttgggcagtatgagcattttaataatattgattcttccaatccatgagcatggaatgtttctccatttgtttctgtcatctatgttttcttttagaagtgttttatagttctcattgtagagatctttcacctctttggttagctgtattcctatgtattttatattttaatggctgctgcaaatggaactgtgtgtgttttgttgttttttttttttttttgagacagagtctcattctgtcgcccaggctggattgcagtggcgcaatctcagctcactacaacctcagcctcctgagtagttgggactacaggcacgcaccaccatgcctggctaatttttgtatttttagtagagatgaggttttgccatgttggccaggctggtctcgaactcctgacctcaagtgatccgcccgcctgatcccagcactttggaactgtgttcttgatttggctctcagtttggacgttattggtgtgaaataatgtagaaatgctactaatttttgcacattgattttgtatcctgaaactttatcgaagtcatttgtcagttctaggggccttttggtggagtttttcggggttttctagccatagaatcatatcagcagcaaagagagagagtctgacttcttcgtttcctatttggatgcctttactttctttctgttgcctgattactctgactagcacttccagtactatgttgaatagaagtggtgagagtgggcatcctcatcttgttccagttatccaggggaatgctcttaaaacattttcaattctgctagagaagagaggaaggcaaatgaaatggataaaactcataagaaatgttaatcacccttcaggcaagggcacatttgaaaagcaccactcttgggcatggacctctgatcatccttctacttcctcactcctaagtgatagtgcatagcccaggaacacccaccacctgctgtcctccaataggaaaggaaaaggcaagatgacaaaagaaaaaaccttctcagagtcaacagaccacacaagaaaaagataccttgaaagcaaaaacaacctatcagtagacttcctggggacatcatgaggcagccagcatagctctttggtctttgttgcatgcattgaggcatcccaaatatcctaacgcgaatagaattgttagtcatcagactacgtgcaataacatgacaggtggtagaagaaactttgagaccacgaagaaatgagaatgcctctattttttattaatttttatgaatgcctatattttttggcatacaaatgcaaacatttgttttctccttaattcagatgggttaactccatttctttttattttatttttatactataagttctagggtacatgtgcacaatgcgcaggttagttacatatgtatacatgtgccatgttggtgtgctgcacccattaactcgtcatttacattaggtatttctactaatgctatccctccccctcccccgaccccacaacaggccctggtgtgtgatgttccctgccctgtgtcccaagtgttctcattgttcagttcccacctatgagtgagaacatgcggtgtttggttttctgtccttggatagtttgctcagaatgatggtttctagcttcatccaacccagcagctagtcatggttctccgacatgggctggagtccttttggagtattttcacaaatagtccccgtcagtagaagtcagatctgtctttagtgttgtatagaaacatccatccattattttttcaatctcagaacttgatggcttcaattttccattatccatcatggagggtgaagaccttttagaagcagacagcatcatacgtccacataggtcacgggacaaacagtgctgatcactgcctgttgacaaagtgttgacagtaagggaggggaggaaacattttcttgtagctagagaggttttttgaggaggtgggttggagtgaggacaaggggaagccagtctggctgctacattgacctaccaaatcttgtgtttgggctgggcacagtggctcatgcctgtaatcctagcactttgggaggctgaggcaggtggatcacctgaggtcaggagttcaagaccagcctgggcaacatggtgaaaccgcttctgtactaaaaatacaaaaattagccgggtgtggtgatggctgtaatcccagctactcggaaggctgaggcaggacaatcacttgaacccaggaggcggaggttgcggtggactgagattgcgccattgcactccagcctgggtgacaaagcaagactctgtctcaaaaaataaataaataaaaataaaaataaattgtgtgtttgccacgtcagcacttcagtttgtgttgtctacgaaagacatggcatacagtatcataagttactgcaaaagatgcctaattccctggagatcaagatctaataacaaatacgaggaaaactttaaaccccaagttgtggggtgtgtggtaaggtgggggcggatgtgtcagctagaaccttgctgagaacgattgctctgcagctctgtcatctcagctcatctaatgaccaaaagcagatggaagtttttgtgtgacctctccaaggccttcttaatggtcagagagaattttccttttatggcctcccccctttccccttcatagcattgtgggagagagagattcattcacaaccaatttgcatggcaattttttagaggttttatgatctctcaagcaaaataaaatcttctttactttcatttgatctgaaaaggtaccacttttggaaactgtccaggggaagcacgggacccctggatttggatccagttcaaggtggccttgatgaaaatagacccctatcctgcattttacatctccttcctggcttttctattctctcaaacctgcaaacccatattctttttgccttcgtttgctgtcatttaccccctagcatgctgattctcagctgccagggccccaagtccttaacttgctctccagttattcctgggatgcttcctggcaaggctccagctgctggcatcattgctcttgtcctgatgtgtgtgtgtgtgattctcatgaccaagctgggctctgcctgggcctgcgatccccgctgaatcccctgcacctcatgtagggtaggcacatcggcattctatcacattccatggagagaatgagagaagaactgtgctgattcctgactgccagacagcagatatgagcccctcaaagagagtctcaggaaactcacagcaccctgagccacctgtatctcccttcccaccctgggcaggtcattcatcatccttgtcccctgatttctgtagagacctgctccaagcgcttacctgacggttgccatgttgtacctgccctggcaattgttggctcctcctcagccaaggcctgctgctattgctgtaccagttcagggagtcatgttcccggtgctctgtgaaaaatggggatttattgggcagcaaggtggtgcgctccagtgtgcgccacatctgtttggtcttgtactgtttggtatatacacagtccctcggtgggagttgttggttagccttccaactgtgcagtaggtttttctcctctcgccatgcctggtctagtagcattctccccagaagaacgttgctgctggtctgcttaagagacctggatgggcccctgcctggcaatgacccaggaaacaatgggggtgctagtgcaggagacaccatgcttaaattttaaaaggaatagttaattcttcttgggctcccagtttctgggaagctgtgctgtgtttgtgtgagttaggtgtccaaagtggtcagctatctaacctctctgtacaaaatctccttatgttttcctcgtgccatgtgtctaagcacatatctctatgaagcaacggcatctctttgcccattttgtacttctttgggtggtatcattcggatgtgcttccctgaggcgatgtctgtgttttctaacagctcagactttggcagctcttgcatctattgcagcctgtttatatgagacacctataaaaacattcagcctgcaccgtgggtgtgccagcagcaccctatgacctgattttaaatcacagtgtgtgagtggccatcgtcttatgggccagggcatttttaaatggtgtaacgaggacagcgcatggcccatagcagaaagctttgacgccctgatatggtcactgtgaccaagtggccttggcaagttgcataaaccccatgactcagtttcttcgtctgtgaaagggagatattgatactcaggatgagaatcaagaggagagaatgcttgttagagtttcataaaaatgaaaagtagtgctattgatttattttgcgctgtgaccagttcactcaaactcttgcacacccagctgggtaaatgccagcctcaaggtgttttcttcttgaatgaagtacttggttttttcagacaaggtacattctagcaagtaaaaccccaacatatcccagtgttctcttgaaagctaacatgaagtgggggaagtgaaatacttcaactctagaagccaaacactcagaatgtcttggcagttgcttggggctgcacagtgtgcttttgaaagcttttgccatttataagagcaaagtaccctgataaccttttgtgtctgggatttcagtccaaatcaaatagcctctgtgtatcccatggattctgaaatttttatgggatgtgtggggctgttttgccatgatgaatgtgacatgtgctacttcatgtggcctttcttttttatctaaagaggcttggcttgcagaatggaggctcagctcccacagttcttaaaggatcctattgtttgtctcctatgtcagcatcccctgaagaataaggatcacctggttttcaacggaaccaggagtttattcttcagattggagacacactcccaattctggttaataagctggttttgaggtggaaggaaaggaccctagtgatcatctggtacaacgtggtgcaccttttccaggtaaaaactagaggctcagaaagcaaagaggcctttgctgactcctggagcttgcccggcaccgaacagaccagccgaccccttcctggtggctcagtgcttctctttctctgatgagtcctgaagaggcttcctcacctggagaatcaggggtttctcaggccctgcttccagagaatccataagaatgaggctttctgggctcagccggcgcactctccacccagaggttttgggagggccacgccacaggccaactacccactctgcctgaatcgccttatctctctgtgtgctctccacaatctgctctctgccgtgagtagcataagataaggaaggctgggtgctagaggcagctgggtacagggagaaacaaggacaaggatggacacggaccgtccacttgacttgtgggaaccagctgactctcttaggtgcggacatctgacttttttcagatagactgaacgcacagagctcattcatgcctatgaaggagactaaactgcctacttacttgaccagcttttaatagtgcttctcatgtatgccaggcggggtcagggtcagctgcaggattttctcacccgtactttttaatcccataacattgccatccttggccatccctttatcatttttcttttcttttcttttctttttttttgagatggagtctcactctgttgcccaggctggaggagtgcagtgatgtgatattggctcattgcaacttccacgtcccaggttcgagccattctcctgcctcagcctcccaagtagctgggattacaggcatgcgccaccatgcccagctaattttttattttttattttaatttttgtatttttagtagagaccgggtttcaccatgttggccaggctggtctcaaactcctgacctcaagtgatctgcatgccttggcctcccaaagtgctgggattacaggcgtgagccactgcgcctggcccctttatcatttttccataacaatttaggcaaggtaaaaatatcatcaggtccaaggatcatttgggaggggggaccctgtgttcgacagtcatcgttacagacacgagtttgctcatttgctttgacagcagtcacttggagggaagcactatgctcttcccattttccatacaggccaccggggcgcagataagttaaatgactggcatgaggacagtcagaacaggaacttgaatttcactgtttagagaagaaccagaaatagaacagctcgtttttatttactttttctgaaatgttgctttgaagaaaataggatgtgtgtaaatcaaatccagcatctgaacctgccttctttagcttcagcaggtttttcttgagcaggaggtcactgtgcggcggctgggtgcatgccggagtaggaaaccactccagtttggtgtccgtgctcgactccacccttcggaggaggaggctgcgtgtgaaagggtacaaaagaggaacgcttgcaggaaaatcttttttaggacaaaatcattattctgttccttgctgtcttttagtagcgatccagctttccaaaattgtttctctggctgtaataaggattgttaaatcaggacactcattatgtctctcctcattttggagtcaggtacatctttcttcagctgagcttaacctagaagccagcatggaaaggtaggggtcacctggaccacatttgtcaaacagcttttcacctgggtctcatcatcccgggcctggaaaacccgagatggactgaatttatggggaagcctcctagaagtcactcagggtcaccccaaaacatatcctcctgcccctcttcccctccacagctgagcacagacctcagcactcaatgtaatataaaggaaatacatgcaagcaagatattaccgacttttgagtaacagggttttctaagtcattgttcctcggtttgactcctggggagtatctccgtagtgattcacttaactgattaagggcagttcagagcatcctaaccccactcccgccaccagccttggttgtaagcagagatgccaggctctctttgcaggatggcagtgaggagcccagttaggttacttccactttgtctaccttcctgctgctaccgtttatgaaaacagaagcaaaatctgaacataaacatcaataaagtaatttgattgacatacatatacacacacaaaatcaaatttgccctagcgacctcactttgatgtgtaccacccccatcccagagaggtgggatcagccacccagtgccttctcagaataagcatattaccctgacccgagccatttctgttttgttttcttctccccacctggaatccttgaataacatctgtctgaattattctgggctgtatatcatttcagagagttctaggaaacaacactgaaactgatttaagaaggcttttcagctggaagacatggccactcaacgcctgcgcctggggacagtggtggtaggggagggtgaggttgggatgacctgtggtaggaccaaccatggaataacagggtcaggagttaacgattcaaggggtgcctccgagttcccattgtgcaggtcaggggtggctctaccgagtgaatgcccttcttctttcttccgtacgcacggaactgttttgcatcttggttccaatgcctccctgggttctatggcattgcagctttgccccgtcgtgaaggcaagtccccgggccacatgtataatgttgggggaaagaggtatacagggtttgggaggaatggggttttcctccattttcccagatagggaaatgtgtggtcagaaatatgaaagaactttgaaaagaacatgagatgaggtctgtgaattgtgaaacatggtgctcctcttagttctggggcagatttttcaggatcaagaactaaaaccaagaatacctttgaacactttagtgtggctcatctggtggccacactcacattgctatttccagtaaattacatcgcttacagacactagagccatacagcagcgggaccccatccttccagagttattaatgttctaggacaaatctagtatcccaaggagattttctttcagctaaagcagaagcctgaattcacttgagttcgggcagaatagataattcatccagattacttgaggccccaaatggatctgacagtctaaaagttagattgtaaaaggccgtattgatcctaatatcttattctctttcttatacctaactagggattgccatttttatttattttgtttttttgagatgaatttttgctcttgtcacccaggctggaatgcaatggtgcgatcttggctcactgcaacctctgccttctgggttccagctattctcctgggattacaggcatgcgccatcacgtccagctaatttttttgtatttttagtagagacggttttgtatttttagtagagacgaggtttctccatgttggccaggctgatctcgaactcctgacctcaggtgatccacccgccttggcctcccaaaatgctgcgattacaggcatgagccaccgcacctggcctggattgccatttttagacacacagtttaccttttaattttgcactgtcctgttttgataactacctggaaaatacttggggttagctgctaatctgattgaagataaatggagttttcctcagattggtctttttgcccttttcaagctgaagtaaagaacagttgggcgtatgctgggaggaggagatatggaagagagacactgttgtcctcaactgtgattctaatccaggaagtgtcctttagagaggagggtcagggaatgacagagctggacgagaccttagaggtcaggaagccagcaccatcattttacagaaggggaaactgaggctgaggctcatcagtggcagaacccagggtgggaacaggtcttcagccttctgtcatgaggtcaccatctgcctttccacctcattctctgcagcaccctttctttcttgccctacctgtctttcagtggcagtgttaattattttagacacaagaacgtgattgtagctgtgacatcagaaaacgactatctttcaagccctgaaattgtcatccctgggttagcttttttttttttttttaataattcccctaagtcagatgggttataataaacatttaagatttgcttttcatgaatatgtgtgctgatttaatttttcctgaagattatttcttttttatttgagacagagttttgctcttgttgcccaggctggagtgtagtggtgcaatctcagctcactgaaacctccacctcctgggttcacacgattcttctgcctccacctcctgagtagctgggattacaggcacccaccaccacgcctgactaatttttgtatttttagtagagaagaggtttcaccatgttacccaggctggtctcgaattcctgacctcaggtgatctgcctgcctcggcctcccaaagtactgggattacagatgtgagccaccatgcctggcctttctcttgaagattgatttgcatagtcagtacgctgagatggagagagcaggacaccggggtcagaagacccctggtctaggcccttttagctgcagagaagtgactgactttacatcctctgagaaattgagataacaaggcctgccttctcaaaggggtgttcataataatcggaggagataatgagggtgaatttgctttgaaaattgttagtactgcttagaaagtttaaggggtgctttgctccattgctttggatcagttattttttaatatacagagaagagattaaattttagaaatatatattaaatatatatttacagttgacccttgaacaacagaggtttgaactgtgtggaatcacttatatgcagctttactttcaataaaagttatagtgaatgtgcctgactctcctgcctccccttcccttcctccgtctctcccacccctgagacagcaagacaaacccctccttttcctcctcttcctccttcttggcctactctacatgaagatgatgaggatgaagacttgttttgttgttattgttgttgttgtttttgagacagtctctctctgttgcccaggctggagtgcagtggcacaatcttggctcactgcaacctccacctcctgggttcaagggattctcctgcctcagcctcctgagtaacagggactacaggtacctaccaccatacccagctaatttttgcatttttagtagagacagggtttcagcatgttggccaggttgctctcaaactcctgacctcaggtgatccacctgcctgagcctcccaaagtgctgggattacaggtgtgagccaccgcgcctggcctgagaatgaagacctttatcttgatgcacttccatttagtgaagagtagatagatctcctctttcttatgattttcttaataacattttttctctagcttagtttattttaagaatatggggtatgatatatataaatgaaatacgtgttaattgactgttatcagtaaggcttctggtcaacagtaggttattcatagttaagttttgggggaatcaaaggttatatactcatattttcaacttcatgagagttggtgcccctgacccctgcattgttcaagagtcagccatatttctatacagattatttttgtaatccttcgaattttttatgctttcattttatttttatcaaaaattgctgccaggcatgtctagagtttttgtttcatatcagttaagaatatttgtgcttcacttttgaagtccatcttcttctatagatactcttagaaccgtaaacagctactctatgtttaaataatatttttttctttttgatggaatttaggattaacttgaaaattgctcatggttagtagatgcagagtgcgtgaaggcagatttttctcatctatattcagggaattttatgctttacatgaacagcagatgttagtggcattactccgttcacctatccaggccccggggcctttgctcatactgttactgctgccctggaacacccttccttccgtcgttgcttgccaattcttgttcaccctttcggacagctctggcttctaagatcctgcccacaggggtcgaatgtctgtcctctgggctctgacagagactcctgcatgtctgttacatggcagtatctaaattttacagttccaaggttaccggtgtggctctccttcacttaactacagcgaagactgtaggttcccgggagtggggaccacgtgttttttctcctgtcttttaggagctgctgtagagtagacttgctctatccatgtttattgaactgcgctgaaggacaggaagcctctgctcatttgaatggagacccatcttttaaaattattcatttttaggtccttgagacgcaccattttattaaatccactgtgttcacagacccggcttcctcacaaccctctaatgcaaccttctggtagccgctttataccctggacaatcttctctccacagcccccatttttttttttaatcttaacccccacagcaacctgatgttcctgaggctttgtttggggtttagaatctggaattccagagtcgatctgtcagagaacatcagatgcctgtgaagtcatcagtttcacagtggtggggcagggaacattgagaaccatatccatcagagaaagtcacatgtgcgaagggaaagagcaaggggcaaacagcagtttgattccatttttgtttaaaaaaatggaaaagtgaaaagaatgatcgtctaaaaataagcacgaggaagtctagaacacggtgcttaccagtcaagtttggagtcaggcagctggggtttgcatctctgctccacttctgattggctgtgcaacttaggaaagtggcttcagtccagggtctccattcctcctctgtacagtggggataattgtaggatctgcttcaggatgttgttctgaggattcacggagacaacatatgcaaagccctacagttgtgcctggcatatagtgagcaaacagtgcctattacttgttactgttcaattttctagactgggcgcgacagctcacacctgtaatcctagcactttgggaggccgaggcaggtggatcacctgaggtcaggagttcaagaacagcctggccaacatggcaaaactctttctctactaaaaatacaaaaaaaattagccaggcatggtggcaggcgcctataatcccagctactttggagactgaggcaggagaattgcttgatgaacccggggggtggaggttgcagtgagccgagattgcgccactgcactccagcctggatgaaagagcgaaactccgtctcaaaagaaaagaaaagaattttctacagtgactgtgtatgcccatgccaaatatacctatgaaaaatttggagaaagtgttaaaacaagcataatccctatttgtgtgcctaagatcttgctgtgggcctgtgtaaagtggccagaggggctggtgactagttgatgtgaccagtgactaaaggttagaacattcgataaccagactgaccctccagaattccatctacacacacatacatacacacacaaatacatttacacatacacatatacaaacatgcatatacacgtaccacatgcatacatacctgcatatgtgtatatacatgcacacatatgcatacacacacgcatgcacaaatacatgtatatacccacagaaagacacatacatatgcacatacatgcacagcgtatacacatgcacatatgcgcatgtacacaaatacatgtaaaggtgcacacatataactgcacatgtatgtataccatatacataagtgcatgtacatatacacaagcatgcacagcatattcacatccacatatgcattcacacagtacacatatacacacatgcatgtatgcacaccatatacatgtgcacatgcatgttcatgcatgagtgtgcatgtacgcgcacacacacacacacacacacacacacacttaagcccccaggtgccaggaagactgcagcactgtcttcctaggtatttacatgtccaaagggatgaagcctagatcttagagacaattctaggtcataaaagcccagactcatgaggctttctgacccctggagatattttatttatactttaaaaggttggggtgagaacccaggatcctttccatcccatctccaaggagctaaaggtttctctcccttctttctacttggggagggaggcagctactcctgcacgtagacagaatgcatcgtgcgccatcccttgtcaatgggagctagtctgcgcccacatagaaagtttccttcgactgtcatcatcttgcttgtggtctgggtgtcggggctgctgctgcagttactctggctgttagtcagggtgtgagtgtcagtaaagaaagggcccttttccctgacccagctgcctcctctttctgcagtattcacttatataaagtccttagtcgtgcaaggtgggcagcatctcagaccctacacagtttcacaaagcgggtccatataactgagcacttcactggcctagagaaacctgtgtccttgtctctgggatgtgtttgaggaactggacgacaggtcagcacagcccacaggtgcattgttgacaacaggaggctccatgtggccccaccagtgttgcttcttttagcaaagacattcagtgcctcaacaaacagccagtttttacacattgtagctggattctttttacagaaaagtacagctctatcataatgaagtgattctgtcctaagctgttcctgagaggagtaggaaatgctgggatcggccaggtgtggtggctcatgcctgtaatcccagcactttgggagtctgaggcaggcagatcatgaggtcaagagattgagaccatcctggccaacatggagaaaccccatctctattaaaaatacaaaaattagctgggtgtggtggtgcatgcctgtagtcccagctactcgggaggctgaggcaggaggatcgcttgaacccgggaggcggaggttgcagtgagctgagatcgcaccactgcactccagcctggtgacagagtgagactctgtctcaaaaaaaaaaaaaaatgctggcatctgttccctggtgtccccacttttggtcagcctcacctgggaatttcatacattttctgatcaaagtccaaagtctctgctttgcttgagctttaatcattggctataaagcctcccctgcccccaacattgcacacacattaaaattagattacagccaaacagcaatatagttttggggattgagggggcaggtaagaagcacatttttagataaatagggaatcagaacctccattatgggaagatgttttgatagtctcaggtaaaagtctgcttagaaaaattttcactgcaagttttcagtatgttttgagatagtttgtcctatatactgatatttgttcattgttgaaatggctctgacccttgttttctgttatttaacacttatgttaagcagaagaaacataaaatgctttccacacttcagtgttcactttaacattttcttgattaagaaaaatttccatttatcttaaggaagtagatgacatttataaagagatctaaaggatctctttataaaggaaaatggatgaggtttagaaaggactctggcatgaaggaataattccttttcagagtgtcctttatctcacccatcaatcagttgttcagatggtttggcaaatgagaagatggtgtcctgataagccattccagaactaaggaattccagcacccatgtcctccgtttgctcagaaggagacagaaatggaagattccaatgattagatactccaagaagaggtgagaagagaaatggtggtgaagatgcccaccctgatagggccgggctgcccatagtacacagactcccagggccgtgtcagctctcactgtctgcaggctcacagcctggccacccaatttctccttcaatactgacccaattaatatagggtttgtgtcatcatccccatagttagtgaagtgatttatctacccagcaaccaccatgcccagctctgtgctgggtgtgggtaccactgaagggggactccatggggtcaaggggaggctcggggctcagaaggaccctagggacccttacccaggatgttgggagagtcaggggttttgatcagcaagtattttgataaatctccttaaccatatattttatacttggaacaccaattttcagagaattagaagaaataagtatacataaatgttacagaaaagttcacctttctttgctcagttagcctccagtggtaccgaggaggaggggcccgtgattctgaacagttttctgcatgattccccgccagctctgcaggtataaaaggtgtagggtaccacactgatatgcatcgactgcagagtacattttgaaacaaacccttaatattaatttttctttttcatttagctcttatgtcaccagatgaatataggggaacgtttggttgtttgaaatctagatcagtgagtatttcatattgatgctgtccggatgagtcatacttactactagaaagtgagatgagagtgttttgtgatcattcaaatgggttgtgtatagttgcgcctctttccagagcaacagttgactttttcactgaaattaactacttttcctttgccactttcgttagagaaggagacagagagtcaagggtgaggaagggatgagagacattgtactgtgggaataaacaaagaccacccaaatgagaacaagcagaggccatttatccagagcttgcactagtgagggtgtcggccaccagcacttgtgtttggcagagacttagaggcaggcagggggtgggaaagcctcacagtggaaagaagggaaggctgcaagcatgccctgattggaggctgttggcatgggggagctgctggtaactaactagaaatggggcctcctgtgtgatccgttaggggagcatgtttggctctctctggttggttctaagttggaagcagtggatcggggtggaattagggcagctgtcatttattaatcaactcctggccatttggggctgatcattatagtttggcttcgtggatggtggctgcagatagaggtctgacttcttccaagtctgacgtggagcaggctggctccatgctgattattgtagatgaggggctggcttcctgtacaggttgctgcaggctggggatcaggttctgtttttacatgtggtctgcccattgtccatttgtacattcagtctctcagtgccaatgtagcactggctaagaacaaacaacagacccagcacaccggttggcataggctagcatggaagccacccagccaggcagctgactacatgcactcaggcacccaggctgctctgggtggatgccagctggggccacactgcagccatccaatgtcagccctggtgggcagtttcatacttggccatggggcttgttgacagtgcagtgtctttgtgctgtgagctcctaactgccttccttcaatttgggattcacatcagagaactgcttctctgagaggcatgctgttttattgggcaaggcagctctagctcagattttagcccatttttggtagtgaccagctgtctttgtcatctagggatcccctgacagtaaaagattctcctgcatgtcatcatgctcctgttctcagctctcacctggttcctcaccatggcagagggttttctggtcaggaatggattattccaaaccactctggaatttctgtaggaaccgacccctccttcagtcagtttcttgccacccctgcaagttcaatgctgtggcttccccaccctgggtgcggtgtcaggcccaaggtgaatggagacagtgcccaaatggcttggccatgtgggccagccctcggtgcccacgatttcagcacctgcaggcccacatgtggttttctgaaggtcatgcccctcccccatggttttctgcttatatgtttcttgtgtgttttctccaacatttagggaaaattctagggtggtaacatcattggtagtcaagggagacactggaatcttttattttgctagaagatatgaataaaaagtttccagagtttaaggcattaagttttacataaaatgcgcttaaagtattaaagttttataaataaactctaaaaatgtgatgttgggttttgaaagacatctgtaatttttgaagaggggatggttttaaaaaggcatttcttctcttgtctttgtgtgtgtttgtacgtttaaattaaatgacatccactgtgtgtaggagttaaaagagtatttttttctcctaataacaactcttgtaccattgactaccaagaataacaataagccttctttttaagttaaaaaagaatatttatttttgtcactgaaagaacaattattcatgtctttaagttaaagtatttttatgaattctaaaacattttgatgtttagctgcacacaataaaaatgtcatattagttggtccttcaactaaaatattttggttgcaggatcttggcctttcaataatactaagtatcatttaatgaggacttatttgtgccataaagtgttgaaaatgccttacatatgttaactcatctactcatgctattctcattttatagcttgtaaactgaggcccagaaaggttcagccatctgcctgaggtcacacagccacagtttggacctgagccatcaatcatccaccaaaagcctgcattgaccctagaagattccattgcatgttgtcaaggcgcttagtttctctcttgtgtctccccaaaacataaacctggaatggaagagagccacttactctatagatgcttttagctcagaacgcttcaagcttttggagtatgagaaataataacaatcattccattctttcctggagtttgatctcagctgttggtgatattgttgggactgatttgctatctataaagccaaatttgagaaaagacaggttaaaaataaacagggaggatgatggtagtaaaaataacgtgactgtcttcttatcttggaattcttttttagtttttagcagagttacatttcttcgttgtggtaaaatacttaatgccactgaactgtcacttaaaatggttaaaattgtgcactttagattatgtatactttaccacaataaaaatgaatttttttttttttgagacggagtctcgctctttcgcccaggctggagtgcagtggtgtgatctcagctcactgcaagctccgcctcccgggttcacaccattctcctgcctcagcctccggagtagctgggactacaggcacccaccaccgcgcctggctaatttttttgtatttttagtagagacggggtttcaccatgttagccaggatggtctcaatctcctgacctcgtgatccgcccaccttggcctcccaaagtgctgggattacaggtgtgagccaccatgcctggccataaatactttttttataaagccagtgagctgatggggaactcagcaaggtgtgacatctgtaggactcaaaggttgtagtgaagttttctcctagcacgttaatgttctgtgttgatgacacatgtaatcagaacgccttcgccatatatgaagacctttaggaaaaagccaagaatagtgtagaagggccttcttttggtacaagaagtggctgatttcgtggcctcaagaaccactttggtttctactgtgtttggggaagctacaagtacagataaagacactgtgaatatatgtctttctgtgtttaaaagaagaggaaagaaaagagttgatgcagaggggacccctggaccttatttttagtgttgacaaatctggtatcatttagaagtggatgttttcaagggctttccccttaaaggaggaagcagaggcccagggaaggagcttgcattgggtgggccattgtgatgctgtggctgggcctgggagattcgactggactcatgtttttattgggattgttttcgattttgcaaagaccctggttacaaagtccggtgggtcctcagtggtctgcccagccctgcttttcccattggcccagtttttcttagggtgtgatcttccaggatcatatagtattctagaagaaattcctgtatcatacttgggaggtaatgtgaatggaaagttcttatagacacaaatcttataggtaagatctggatgaagccttgagtgtttgcctttctgggatccaaggaaactcatgaaacagggaggatttaaaggaggaggaaagggaagtgaaaagagaattcccaaagcctggaattgacccacacagtttggcatgaaatggtcacttccgcatctagagcacacattatttttctgaagcaccctgttgaatgagaggaatacatacgtgccatcataggttgaaaaagtgatcttttcagcataaattggtgggtgtttgagagcattacttgcacagttcaacaatacagagctggaaatgcataaagaggacattccctgctagtcaacgaatacatagatctgtagctggaaattagttttaactttcaagtagtcaagaaacttttatgtccaataagactctctttacgtaattttaggctgtacactggttaaaataattctatttggggaaaatcttgtggttgtttgtcccaaatcgccctgacatgttctctgccttgagtccccaaatccctgccgtggggcgcagcctgtcatgcatgggccaggaggacagccagcacacggggcagatgccgcaggtcatccagctacgttttctgtgcattcatctcaggaatacgggtttccctgcacacttaaatctacgtgtaacccaagtttatagacctgctgggaagtggaaggcagttggttgcctttctcaaaggctgctccatgagcaagatgcctttcatctagaccattccgctggaagcatctgtcagaccagagtagtgcatcagtctaaagtcagctctctcttctctggtttagggtggtagttgtgtgctttggttctgtttagctgagtgggtgaatgaaagtaattaagataccctaaatagggtctttagctaaacggtcacctccctgcctaattgtgacaccaataaatccaagaaaggggaggacagtggcagcaggtcacagtgggaggatcatggcttggagcaaagacaagggctgtgagttccagccctgccaccattagctgcagtgtttgcgcagttggtttcacctcccaggtcttcaggttcttcatagggtcagaactccaggtagatcattcctgggcttccttcagcttgaaaaatctctgcctcaaccatattctaatcacaacattactataaaatgataggcatgacttctatatttacaaaaagccataatgtatttcctcactctctgtaggaagacatttgaattgttacattctttactttgctctaaagcaaggttgtggaaggtttcaggtgccagcaggtttctcagggctagagtctgtaacaaagagatcctggaaaactggagagaggttggggaggagaggaatggacacagcgtggttctggtcccacagaggtcctattgtctgtaagaatttgatgttggctaaaagagacatcaggagtcactggggagggagaaattatgctgtaatggtcagggaaagtggttagactttttcaaaaacaaacaaaatgtaaaattttacatcttcactttaccctatatagccaacttaaactccaagatagatctaacagtaactctttttgtaaaaaaaaaaaaaaaaaaaaaaaaaagcaagagaaaatagaaaaaaaaatttgtgaaattcagtgtatagaattttctaagattcaatgaaatcactaaagaacatactgacagatttgagttaaactcatatacttcataaaaggtaatcaaaatgtaaagatcattaacctttagaggaatttgcagaaaagaattaacatcttcagtataaggaaaataaacaaattttaaaactgatactataatcgagttctcatattctggcccaagaataggttgcatcagatttagtttcaagtgtagattcctgtcctctgtcaaactcttctgccaagtcttcagcctccaaaggttgggatcctttctcttctctggcagaaggcattcattcatgtgagggtacaaaagaggaaggaatggtatatggttaacaggaaaatggaagtcaataatgtgcaaagaaaaaggacgagatcattttgtatcaaggtatccaaaaaaatgttacagggctgtacatccaaggttcataccaacattattctcagtcaccaaaaggtgtaagcaacccgtgtgtctgtcactggatgaatggataaataaaatatggtttataggtacagtggaatatccttcagccttaaaaacgaaggacaggccaggtacggtggctcatgcctgtaatcccagcactttaggaggccgaggtgggaggatcacttgagatcaggcatttgaggccagcctggccaacatggtgaaaccccgtctctacaaaaaatacaaaaattagccaggcatggtggtgggtgcctgtaatcccagctactcaggaggctgaggcaggagaatcacttgaacccaggaggtggaggttgcagtgagccaagatcgcaccattgtactctagcctgggcaacaagagtgaaactctgtctcaaaaaaaaaaaaaaaaaaaaaaaaaaaaaggaaggacattctgacccatgctaccacatggatgaatattgaggacactatgctaagtgaaataagccagtcccaaaggacaaacactgcatgattccacctagatgaggtactcagaatagtcaaatccaaagacgggaagtagaatgggagttgcgggggctggagagagggaggaatggagagataccatttaataggaataaagtttaagttttgcaagattgagaagttctggacgtagtttacacaacagtgtgaacagtactgagctgtacacttaaaaatggttaacatggtaaattctgtgttatatgtcttttaccacaatttttaaaaatcaaaaatcctgaaaggtacttcctgtggatgtgcaatgggctttccgcagcattgcttatggcatgagcacagggaaagccttctgcagtatacatcaaggtgcttgacaagttcacactctgaatgccgtcattctgcttcggggactcctcccaagggagtaagcccaactcaaggaaaggctttactaaccagcgttgttcatgttagcaaaaagttggaagccaagactcttgaaaagctttgtgtggttaaataaaccctgagcacccactggccagaaacacatgcagctatggaaagtgttgtttctcgagactacagagtgacatgcggaaatgcatataatgttcagtgaaaaagagaataagccaaattatatctacagcatgatctcaactatgcaaaatggtcccatgcccaggaatgaaaacacaaaacattaatagtggttgtctggggtcatgagtccatggaagatttaacatttttgttttttacttgtctgggtcttccgggtttttgaatgagtgagtagtcttattgggaaggtgcatggtagatgggaacacagtcaaaaatgatctttagtgaaggaaaagaaaggaaagcaattgcctgctacaggtagaccctggtggaggaggctgttcagggagtctcacgttagctacatggttcttgcaataaccaaatcaggcagctggtgttgtgctcccattttgaacaggaaaaagtgaggttccagcaggttagataacttgccttgggtttagcaaataaaagtttttggccgggcacggtggctcctgcctgtaatcccagcactttgggaggtcaaggcgggcggatcacgaggtcaggagatcaagaccatcctggctaacacggtgaaaccccgtctctcctaaaaaatacaaaaaattagccgggcgtggtggtgggcgcctgtagtcccagctaatcgggaggctgaggcaggagaatggcgtgaacccgggaggcagagcttgcagtgagctgagatcgcaccactgcgctccagcctgggtgacagagcgagactccatctcaaaaaaaataaaaataaaaataaaaaaagttttgaaagcctccaggaatgggtgtctggccattttgaggcaagaattttcccccatggaactctgcccatccacgtaagaacaggacttgttttacagatgtttgcatctgtcaatgcagggacccctggctagcacagcataccccatttggccccacaaacctgtccttgtctagctagagtggaaagaagggagacaatgagaccacttgtgatggagcactgcaggaagggattcatgcactcacagtggagtcaccgcctctacattgcaagagagatgggaggcactgatccctgccctggtgtcctgcactgttcagagctacaggagaaaaatgagcaaaatcgcaagtatggaccctttctgcctgccccctgcacaggcaccagactcggtaggttagcactagttcctgcaggggcgttcagtgctttctttaaaaaaataaaataaaataaataaaagacaaaaaaacccgctaatggcttgatatgaatttcactcattatcttcccatagcccttaaaacatcattaagtattaaattagcaagctgaacttcctaagaggagcaagaataatttgaactctggattttaattacttatcttataaacttctatcatgtgaggtagagtgaagagccctgtctacacccctgtggactttcaaagcagctatttaagatttcataagactatccattgtgactacagtgaataaattgtggtcaagggagtgtatcgatcaaacaccagaaggctcctctcagcttctgtcgcaatcttgcacaggagagaactagacctaaacaggaggaagagttgataagcagtaagcgaacgaatcttggttctgaaaagaacagcatcatatgtaaatttcaatttacatttattagaatttgctcagtaaattgtgctctacgatggagtcaaggccagattgggctctatttccacaaccccctaaggagtagctcaccagtgtcctaagtggctgtttcctgggtgaacatagtacatatttgctgtcacgctgggaataccagtgagaatctcatgcatggacagaggacatgatcatctttatgtttgtaacctcgggcctggaacagtctccttttgtgttcacttgattctgaaaggtcagtgttttagaacaggcttttcacatggttcaccaggaggccagttagatcctgtagtgaaagggcaaactcatggcacccttctgcttctcaaggcaggatgctgcaggggcagtgaggtaagacggtggacacgtggaggagaacaaaggggagccccaggggcatctgcagccaggtggagccgttcagccttctggcacacatctgttggctgggtggaggtatgagggcgcagatctgaaaaccaagtggtgacctagggagggaacaagcgctgtgcagcattgatgaaacttaaaaggtgaagtcctggtccgggcacggtggctcacttctgtaattccaacactttgggaggccgaggcaggaagatggcttcagcccacgacaaaaaaaaaaaaaaaaacacaaaaaattagcagggcgtggtgacatgtgcctctagtctcagttactcgggaggctgaggttgggagatcagttgagcctgggaggtcaaggctgcagtgagcagagattgcaccactgcactccagcctcgacaacaggcttttggacatagcctgcctcaacaaaaaaaaaaaaaaaaaaaaaaaaagatggagtcctgcctttgagtctggctggtgacctctctgtggcgtggcatgtagccttagagacgggctcctaggcatggagtgggaggacatggccatgggccggagttgtgggagtggctgaaacccaagcctaagtggcttaaggaagtgagagcaactactgggaaggaagtggagtaggtggctgaatccaagcaagagagagagacctcaaccagggcctcagggcatggaactagggtgtttctttgccttttcatgaccccatcctgagacagactatgactctagatctctatgatagggagagacctagactctaccccagcaaccccaggggaaagagaaagcattttccccccagcttttatacatcagtcctagggaaagattctaattggccttgcctggtcacaaggcccttctcttggactccagcattagcctgaattatgattaggaggccagggtcaggtgctcaccctgcgagtgaggtgacaagtactgtgagtgacaaccttgttaaaactgtatggcaggaatccacaggaaataaatgcaggccaaaataactgaagccccacaaagggagtacactccaaacctgctgcttcgtttggtgatacccattgttggtacgtgcattcacctgtctctacagctgtgcacagtgtggctattgagacgctgaaatgttgagtgctggaccctgaaacgctgtgtgagatgtgctgtcagtgtaaagtgcatactggatttaaaagatttagtaggaaaaacgaatgcaagctctgctattattttttaatattgattatatgttgaaataacattttgtgtatgttaggtgaaataaagtgtattttcaaaattatactcacccatatagctttacttgtaaaaatgtggcttgtaggcatttgaaattacatatgtgactcatattatatttctcttcacaccgctgttctagactgtgttcatatttctaccttgggggtattaatccttaagtcactatccactgggtcattaattttgttttccttgacattatttcctcagacttcaatgtgcacccctgtttgagtgttgggggtttcagtgagtcattgtttgcccttcgtgattcctagacaattctcctaacttgcttagcctgtctcacgaaggcctcgaccgcgggtagagctggaaccacctgagattcgaggggaaaagagtgagtgataggtgtcacaacttttggaatctcattcttggatcctatttgtgaaggtttgcatgtctccatgaaaagcactagcattccgagttgcttgtctgtgttcttacacattttgtttttacctcattgttgacccatcatgcatttattccacaatccagatgtgagaaagcacttcagagcctaatcaaaatggcagctctttgccctcttgttgctctcatgtttatctccctccattcagccttctgtctgtccttccatccattcttttatcaagttgtgacagcccctagtatgagccaggcatagggccgaattcagcagtgaggcaaccaggcccattccccaaactcacagggctagcagatggtagcaccagcttcagctttgctgcatgtctgatgaatcactggctcttgaccaactttccccaaaactcttggaggaaaagtgcacaatgcctagtacagagggtctcagcccactcagcttgaatggggaaggttaaggtaagggttggagtccgtactgccttctcccaaggactcctctgagaaataacccctcgaaataacccccctccctccaaacacattctacttatcacatcttccagtaatacattttgattagagggattggagctaagagccctacttaagcaaaattaaggagctttgtctaaaattgacatattgagagaaacccatccaaaaccagaacagaaaaatggatccagctctctctggcaattacaggtaactctccctgtggcatgtaactgcccagtaaaagtcagacaagaccatccattaggatttaagtgtcacgtgtttaattctgcttgctaattagtagcctttcttttcctgaattaaacgtgtggttaattctggttgagaactgtttcgttacatgactatccacattcccgagcacaggctcccaatgctgtctgctttctcacaagcccccggtccttggtgcagatccagttagaggggacctgtgttacctgctggttgggtgtggaaaaagtattctttgataagcatttaaatgttcatttagatctaattggaagtaaattagtaaagactcagggtaaagaaaagaaaatatttttcattcagactttgaaattgatttttcaaaatttgatgtttataaagaaaagaagtggaaataatgctcacagaattcaagccatgcggcacactccgagtgcattgcatctgctttagcagctcggacttcggaagcaatgtagagagaatgtgtgtatgggcggggtgggggcgggggcgggggcatgtgtttagcagaatcataacccctgtgaatcaaaaggaagcacctgtggtgccagggaaggaccaaacatgaaaagagagaggtgtccacgctgcttgcaccctgaccttttcagatgagctatgagtcatttaaaaatttcagagcaggtagtaagacagcacctgggtgaggaagtagggcaggtgatggagagtggtagggcgtgcatttctgccagaattgggagtggctggtgcggcatggataggacaggctgtccaagcacaagcttaagatgttgtcattcctggccgggcacagtggcttacgcctataatcccagcactttgggaggccgaggtgggcggatcacctgagggcaggagttcgagaccagcctggtcaatatggtgaaatcccatctctactaaaaatacaaaaattagccaggcgggcgcctataatcccagctacttgggaggctgaggcaggagaatcacttgaatccaggaggcggaggttgcagtgagccgagatcacgccattgcactccagcctgggcgacaagagtgaaactccttctcaaaaaaaaaaaaaaaaaaaagatgttatcattccctgagatcgcccctgagctttcatttgttgaaaacatttgctgagcccttccatatagtagatggcagggacatggaaataaaaagctcagtccttgctctcaaggagctggctaatgagagagcagcccagtggattgtcagtcagtgtggtggctgccctcagatgtggccatggggcttcctgggtccatatttaggaacaggccagagcaggccactgcagtgacttggtaaccattggataggtcactagatatgtgtttcagggagggttctaatcgtgaaaggccactgcctccaagagtgggagcctggccaagtctccgcaaatgggtggcgtgaaaacacgctcctgttaacctgggctgcatgaccacagcaagtgtttctgtgcacccggcgtctgctacagggcaggccacagtttactcttgaacttcgctttccttcagttctcaccaaatgactctttgtcccactgaaacaaccacatgtgtatattttgtgatctgtaacacttggtctctcttatgtctgcttcggagagctcaagctgcctcctggcattgaagaagaagcacattgccttaattttgtgtatttggccattatcagctgtaggcaagttggaaaactggttgtaaaacatcctttaggaatctggaagaaaaagtcagtactcaagagaaggaaatgatgcagctctttataaaacatgattcagtgttaaccagtttgtttgcatgatagtcctagacaaagaggccaggggttaagtcatggaaaagaggtctcgttgcctctcttttgcatcatatcagggactttgctgtaatttctagttccttctcactgtgaaagctacaggccatctgactcagcctctgtcttcagggatgaggatgctatccatattttaaaaccgtgaccagcaagacgtagagaaagaaagtgatttgccaggctggtaggtggtgataatggttagactggaattcgagtctcttgcccttgtctctccctttgtcatctgctttaatgcttaaaaaactgcagagaaaaacaaactccttccagcgtgcactctcacttctattagttactttaatttcctcgctgagcagagaaagcattgtcacactaaagtttttgctgtgagggtctctgtttccagtggtctctgtgttccctttcgttatggggaaggctggcctgatgtggtggggctggaagagttaggggtgctgagcaaggagcaattcagaaggtggcggggagttcccaggactgcacataaaaattaattacagaaaagaaatacatcattaacgtcagatctcacaataggtcccagtgtgactattatgtgaaattaattactccctactttatttttttaatcaccttctccgtactctgaaaatagtcctaattactgacattagttgtttaagtcattaagggtgatcatgttacacgtcagtgtgcacgccccgtcctgtttatttggatttaaatatagcagcccttgccctccatagtgtaattttcctgctcaataagatatttagtaaaactaagtaaggttgcataatcaacgcctcaagaatataagttgttggagtaaaataataaaaacacatgcatttgtctgggcacggtggctcacgcctgtaatcccagcactttgggaggccaaggcaggtggatcacttgaggtcaggagttcaagaccagcctggccaacaaggcgaaaccctgtatctacaaaaaatacaaaattagccgggcatggtaacatgcgcctgtgatcctagctcaggtggctgaaaggcatgagaatcgcctgaacccgagaggcggaggttgcagtgagccgagatcatgctactgcgctccagcctgggtgacagagcgagactccatctcaaaaaaaatagcatgcatttgtgatggaaagaccactgcctccaagagtggaagccaggtcaagtctctgtggtcgagatcttttgttcagtcctttattccagaaaatatgcttcagccctgggaattgaaagtgaggaaaacaagtcaaacccagagctcatagaatagtgggatagatgggcattaaatggataatcacctaaatcagtgtagaatatcaccttgtgatggggagttcggtccagtctaggggacaggggtggcccttcgaggaagtggatggatttgaacttagacctgaatggtgggaagggagtaggaaccagtgacgccaggggagcgagcagagcttttcaggtagagggaacagcatagaaggacaccttgggtggagaggatgggaaatgttccttgaggggtggttagaggtataggtgcagattaccaaggccctggtagttttgccagaagtgcagtgggaaagcggtaagggtgggtgggttggttggttggtgttaactttttatttagaatcatttcaaacttaagagaaaagttgtaagaatagggcaactagcttccttatagcctttgctaagaatgttaacatttgatcacagttgcctatcatgttctgtatttatattactgttttttactaaaccatttgaaggtaagttgcagatatgaggcttaaggacactttcctgtgtatgtatccatgattcagtcatcaaaagaaggcaattaacactgatacagtatttctttctaatgcttggtcccctttggaattccacagattgtcccaataatgtcctctacagattcaggatccaatacaggatcacacgttgcatttcgttgtcttctggtgtttagtttcttccttctgggatggttctctaagtcttcacttgttttttgtgacctagatgttttggaagattacaggtcatttccttcatagaatgaccctcagttggggtttgtcttatgtgttctaatgattagattcagattctgtacttctggcaggaatatcagagtgatgcagtgtatcagacgaccatgctgttgattagtcccatgactggtgatgttaactttgatctcttgattaaggcggtatctgccaggtttctccgctgaactatttttccttttaattattatgttgtgggagatatcctgagactatgtaaatatattgtttctcatcaagcctcacccactagttttagtatccattgatttttcttgcttgaaacattactatggtggttgccaaatggtaagtttctaattcaatcctcccttctacgtgtgttagttggcagtctacttgaaggaggagctttccttctcctccatccattcattctttgtttattctctatatcagtatgggtttgtagatttcttttatttggtggattataattacagtttgggttctcagattgtcccagatttggctggggagagctctttccagctggcttctgacgtgtccgcatcattctttgagctcttctgactttccaggctcattctgtactttccttcctccccactggacttagcatggtttttttttattgtttgttgttgttgtttgtttgtttgttttgttttgtgttttgagacagggtcttgctcttttgcccaagctggagtacagtggctcattgcagcctggaactccagggctcaagcgatcctctcacctcagattccctacaggtacacaccaccacccccagctaattttttttttttttgaagacgaggtctcactttgttgcccaggctggtctcgaacacctggcctcaagggatcctcccatctcagcctcccaaagcactgggattatagctgtgagccaccatgcctggcccagcctggctcttttcgagaagagtgaggcactgaagggttccgagctgctcagtggcctgatctgattggcatttctaacatattactgtgtctacccttgaggagcacattgaagagaagcaggagacaaaccggggagaacacttggaaaactttagggtgtagctcagtctgctggcttgggcttgatattcatagtgcagacagagaatgggatggatttaaggtagattttgaagctggaaccgacagaattgtgatgggtgggatgtcggggagaacagaggtgtccttttctgacaaaagaaacacaaggggaggaggggagccgccttggacagggaagatggaaggttctgattcgggcctgtgcagcttgagagttgtttgtcagccaggcagtcatgtgaggggcaggtgggctcaggggtctgggacacaggaaggaggcctgggctggagatgcatatctgagaagggtgagatttgaccacacacctgggggcctcttctacaggtattgaatcaggctgtcctgggtagaagagtgtgtccttcaactcatattctgccttgttttccctttgcaatgcttggcagatgcttggcattttcacaacagatatgaaagcctttgggcatgttttctgggtctggctgttggtatgtgtatcaagaaaaagaaatgtaaacagattacctctctgcaccatcctatgactaccaacccggtggactggggaagatgtcaacaggaattgtcactttttttgtattaagggatctgtgttaagaaaagaatgtgtgtatatgtatgtatacatatgtatgtctatatgtagtatttaaaatctttgctgtcaaaaaatacattatgtcaaaattaaaattgataaggggtaattaaaaatagattgtggataaagaatttatgatgaggaaactataatcatagcattctcacaacctatcggatgggtaaaaggaaaaaaaagaatacatctcaaagaaagctgtagtcagagctgctgctaagtagatgcgtagttcacaaacacagtggttttgttgtctgatcagacctcggaaggggatctggcttctatgcagtaggttcaatcatttctgtagatacagatgttgtttgttttggcatttttggtaatgtttacttgagggttggttggggttttttttgcctctaaatcagaaacagctgatattcatcgggctgtatttaacttctgcttttgtctgaaaagcaaagttggagggtttcattgcctcgtagcttaatttttatttcaaatcaagggctggtattaaccatagcttggcagtgcagaaggctgtggtcaggtctggaggtcagggcatggtgatacagcggctgcctgacagtcactgcccagagcttcccttaccataaccttcctcagtagactagaaaaggttttcaggtttgcccaggttatccacacgtaccatggcatagtttctccagcaagtcagcacactgccgttcctttttcacacctgaaacacgcattgggcctggcttttgcatatagtttggctttagattctatgtggaaaggggcagacagtgctccacttcctgttgatgagctcttccttttacgggagttgctcttgtacgcctcccattttgtgtcctccccagaccagacatggcagtgagggggacgtatgtgagtgaccctcttcttaccctgccttttggcagcattaataacagctatgtatggagctgttagtgaaatggtgttgtcgggtcaggaaggagtaagctctgccttgctataaggtcgtgaggaaggatgtatcttcacttccgtgtcaagagccttagcccgtgcacagcagtgccaccatggcagtcacctatcctcttggttaatctgatgcctctgaaagcctactttgaaacaacagcccgaccttctcactgtctaaaataagagctagagcagaaggggctagtctaccgctagtagcacttagcacaatgacccaagtgctggagcatctcacacaggtgtaggagttggatgctcagccacactggttccattcaagcaaaagagggccatggctgctagactctgcttcctcttccctgctttgatggtgggttgcttggttgattagttggttggttggtttgatgggaaccccatgcagttacctatgagccctttcctgagttgctatctgtgtgttagagaaagagatcctggcagatagaaagatgtgcatatcagtggccacacagtccgtgggcccacagatctgtgccccatgtttggaggagtggttgcttttttcaacatcctagagggatgtgaagcccagcttgagcgtctcatggggaattatatctaatgggtcagaatggcatgagaatgactctaaatagcttttctttctttcttcctgctagtctaaacacaggaatgagaaataaatgctaacgagttgcatccttaaatacagttggaccattttcacgcaatggtgaagacatgtttttttgtgcaaatattttatatctttgccattttgaccattcttattttagtttcttccatctgtgagctctaatgtatatatgtatataatttatatagccctccttgcattccactttgtagtgtgaggattgctgcagatctccttctctctctctcatggacagtgtcctccatcagtataagcttttgacctaaagcacaccttaatttgtcacactgccaaatccaagccaaacacaactcagcacttagaaattgtctgaaatgtgaatgaaaatatttctatcatatcgagactgggctaattgtgaaagcattatgccgagatgtcatgaagatgggatgtgtagtgagctatcagtagctagatgcttggtgggaatttggttgacttacatgattatgaattagcatcctatttctctgtgagttattcataattcagagcccatgtgggataccttttatcttttcggcttgttgatttgtatgttggttttgtagaggaagagtgctcatctgaatgtcagaaaaacattttgtggttattgttttagttgtttaccaaattaccttaagttctagactgagtagtccatcaggataaaatattagtatatttaaattgctcacaaatttccctgatctcttccaaaactgtgtgatataataatattcggatataaataaagcctctcccgcatttaatggtgctgggttcagcattaagtttccatacgattagccaacaactccttggaataaaaagtccacgagaaccttaccttgggacacgtgggaagtgtcttccttgaaactctggagccatttctgaggcaccaaggaacatggcattgaaaaatggttgacaagtcttttatattgcttgaacatctacataacaaagaaaaaatggggcacaacacccccttagtctttaaagtgactgttaagtatttctggtaagtgtcaacatttgtaaccaaggatttatgttgaaaatttagagcagcagttcccaaacttgttgatttcaggcttcttttacattcttcagaattattgagaatcccaaagaggttttgtttatgtgggtttatctatgagtatttatcaccttataaatgaaaactgagaacatttaaaaatgtttattaattcatttaaaaataataagtgcattgcattttaacacaaaaataataactacgtttccccaaacagtataatttagtgagaagagtagcattgttttaatttttgcaaatctcttcaatgtccagcttcacagaaggcaaatatcacgtgccagtgtcctctgggaaactccactgtacatttgtgagaaaatgagattgagaaagacagataatgtcttggctttattatgaaaatagtttagactttatggatccccttaaaatgtcatgagctcccaaggggtcaccagaccacactttgagaactgctaatacagagtaattagttgaactggaatattcttgaacataagaaccctgaactcaactacgaatctgttctctgtccatgaagttgggagtccgtgggaggaagcaggtcgtgctgccgcctgagccagcatgctcctttggatgcatgttcaaccttccctctgtactgggaacgtagcctggactcctgtctgcttgtgtggagctgaggccccacttacctgctatgtgttcttagactactgctgcctgcactgttgacctttcggaagctcacaattcacctggttccctgaccggtgactgctgacatagtctactttgtaggacacctttgctcaagtcgggtaacctggccacaccaatcaccaccatgacttctagttaaaataagaaggtaagctcttaaacactcagaacccttgttgaaaatccaccttctgaccccatttcagagaagaatttggaaagggggcaattccaagtgcctggtgttactgactggatctccaatgcacatgcaggaagtcatgcttccatttaacttggaaactcaaggagctctgtccaggaaggacaactgctgactttgggaacaaggagactcctatttggaccatactctctaagttctggaaggtcacacctgaggcagtactatagatggaaaccttgaactacctcccgctaaaattgttaccagtcccaagtgcttgcctagaccctggccctgatatctctttattcctgtctcttcactgattttgacgccagcctggacccaaccctcagcctgacagcccagggtgacccgcccctcttcagtcaatgttcatgctcagcaattccgtttatgaatggatggtttctctgttgctctggtccctgcagctgtctggccacacactctgcagggccctagctgtgccatcagtgaggcctgaaagattggaagtggagtgagcactgtggcagaggagttgagggggtgatggggagagaacagttgatcagggcaaagcattcttactcatcttctgcatttctccttggatactcctgacacagtttgtcaagagcaggcgactcatgagtcatttgttgactgtgtgattttattcccctccctgtaagaaaaatactagagaagtagagctaagttcacttttgttttatctaccctctttctgcttttcccagcaggctttgctgccatgagcaagcccagatatgtccatcatggcatctttttctttgtccagcagtctcagagttaacctggcatcaggagcacaaaaaagcaacgcagatgttgggtgctttctttccaaaataccatgtctgaacctaaatgtgggatgattaggtcactcacttgccaagtagcatatacatcacaaaatattcagaattattacagtgccacagggaaaggcaaagaacatttagtagtagtgtaggatcttcattcatttattcaaccaatcattcagaagtatttatcaaatgctgttatgcactagatgatacatctgtgaacaaaacaaagattcctgctctcattttactgacattctatccagcaagtaacaaatcaacattctccaagatttggggtgaagtgaatcttttatctaggttctcaatggtcattttaggagttgtagcttctatactctttctaatttgctgtttatttgctcagtccagtgaggtgtgtgagcggggaaaacaattcttgttctttggggtgacattaagcacaccattttaaagagagtcatttacaggttagttaatttattttgtagccagtgtaatatttggtcacctgacaaatagctgaatttgaagtggatgctccaaatcccctgttaggaggactgaaacatagtctactgtgacctaaaacagcgtcttcctaaatggtcaatatttgtttgttgcgtgcttgaagagaatgtttattctcccattattgggtataatattccatatttgtccattagatctgtgctgctcaattttatttatcctaattgttgtgttgcctgatatatcacttatgagatatgtcagaaatttatgactatgatagagttgtcagtttttctttgaggtatggtgctttttgctttatataatttgaggctatattattaggtgcatgtaagtttaggattatcttctcttccaagtaagttgaaacttttatctttgttttgtggccctctctgatgtcaaagttatgcttatatgctactaagttatgtttattgccttaaagtctgtctgacattaacagatgtatggtagattccttttgttagtatttacctggtatttgttttttctccttttactctttaagttttctgtttttagatttcagatgtgtttcttgagaacaatgtttgctaggttttaaaacatcctgtgtgatgactcttaaatctttttaactggagagattatatgtttattatgattactaaagtactttttgttttgttttgtttttgttttgtagacaaggtgtcactttgttgctcaggccagtctcacaaactcctgggctcaagtgatcctccctcgtaggtctcccaaagtgctgggactacagacatgagccactgtgctcagctgaagtacttatttatttttaactattttatattatagttggtatttgtcccatttttttctgcctttttttcccctttattacatttttcctctactaattggaacttctgttcaaattaattaattaaatttcaatttaattaatgaaaattttaagttaatttttctcctcccaaatatgaagaccttagaatgatttattacttacatgttactgttatccagtattaatttctatgaagcacactatatttcctcacttttttgtcttgcctctcaaaattcccatctgggacaatttccttttgcctcaagggcattatttagatttactttagtgagattttgttagtagcaaacttttttcttcatctaaaatatctctattttatcaattgttgaaagatagttttgcagggtatacaaatctagggtgatggtgatgttctctcagcacattgaagggattcttttcctgttgtctggcttccatggttgctcttgaaagtcctgctgcccatccagttgctgttccttattagataatcagtgttttctctggctgcatttaagatgattcccttgactttggtaatctgcagtgtcatggtgattgtctccaggaatagatacattttaaattattctgcttggggttgttaggcttcctgaatctaagaattggtggttttcataaattttggaaaattttcttttgaatatttcctagaccccattccctcgaatatctcttgctagaacttgagttttgcatgtgttaggtcactgtctgttgattttactctcccttttatattttctgtcttttgtctctgcattctgcaatctggataattccttcagatctgtgttaaactttagtaattctcactctacctgtgtctcagcttctttttaaccaatctattggggtttttaagaaaaattaataaattcttattccagaaattatcttttcttcttttctcaaatttcaaattgcttggtcttcattttctaaaaataatcccttcttccttgctttatttttaagcctcatgtttatatctttaaacatattaaacatacttattttattttatttttttgagatggaatctcattctgcacccagtctggagtgcagtggtgtaatctcagctcgctgcaaccttctcccaggttcaagcgattctcgtgcctcagcctcctgagtagctaggattataggcatgcaccatcacacctggctaatttttgtatttttttttttttgcagagacagggtttcaccctgttggccaggctggtctcaaactcctgacctcaagtgatccacctgcctcggcctcccaaagttttgggattacaggcgtgagccaccatgcttggtctaaacatgcttattttataactgacatatgatcctcaagtatttgaggtcattgtgaatctgattttgttctttgttgtttctgctggatcccatccagggtgacctttttccttgtacatttggtgaattttgaccaggatcctaatccttggaacttgatctgtgagaattttttgaaggctgggttaaagttacctctgcagaggatttgtgtttgttctgctacacacctgcaggctgtcaacctgaaaccactcgaaatgatctcttaaggattttcaaaccacgcagtgggaatttgggcctgaaccttgtgtgaaggtcagtttgggactaggactatttgggagaggctaactttctccttggcattgaaaaaggcatgttcccttcctgtcccttccgtgtgggcgggtttattcctcatgtccattaatactgagcacatccttcctttgaggtcgagctttacaagcaagggtctcttcttaggcatacccctcccctccaaggatgggcttcatctctggcctcctgccttatccacacaatatcaaaaagtcttgggccggggctcccctcctgtgagcatgctagttcaaccctgttactctcaggaccccacttcctctctgtgtttggccccagcagactcctgacttcttttttttttttttttttttttgagatggagtctcgctctgtcgcccaggctggagtgcagtggcacgatcttggctcactgcaagctctgcctcccgggttcacgccattctcctgcctcagccttctgagtagctgggactacaggtgtctgcgaccacgccaggctaattttttgttttcagagatggggtttcaccgtgttagccaggatggtctcaatctcctgacctggtgatccgcccgccttggcctcccaaagtgctgggattacaggcgtgagccaccgcacctggcccagactcctgactttcatattagctcaacagttattcagaagtttcctattctcttattctttttagctgacttcagtaggaggctgtccagggtatacactgaaaccacatgcagttaataagtgttctgtattgttaaggccaaggggccccatcttttttcttacagggaccaacttctctgcttagttctcaccccacccctcatttttttgagacagggtcttgctctgttgcccaggctggagtgcagtggcacgatcttggctcactgcaacctctgcttcccaggctcaagtgatcctcctacctccacctcccgagtagctgggactatagatgcctgccaccacacctggtgaatttttgtgtttttgtagagatggggttttgccatgttgcccaggctggtctcaaactcaactcaagcaatcctcctgccttggcctcccaaagtactgggattacaggcgtgagtcaccactcccagccttctctgcttagttcctctagctgagggtgatataggcaggtcccttcttcttccatgttgtctgtagttgggcacacacccccaaccagcactatggtgtgaggggctgtgcatgtaccaacagatatgcttgtggcaagcgctgatgcttcagtcccatctaggtgaagattcctgtggggagtcaatgcttcctctcatctctgaattcagctgtgtgccctctagtggcaccttggactttggaccagtcaagtcttttatcattcagaagatcaatgacttttgtgctttcctgttaatgctgttctgatagccttctgccagctagcctgggtgtcccatcacactgccctgggcaacctgttgccttctcttcaatgccatgctctaaggcaggggttggccaaccactgcctgtgggccacatctcacccactcacccacagcttatttttgtaaataaagttttattggaacacagccacacccgttcatattacctttggctactttcccactgtggtagcccatcaaactgaaaatatttaccatatctcactttgcaaagagtttttcagcctggctttaaggtcctgagctaggatgcttgctgcccacctcttcttcttccttgttttttttttttttttttttaaagacagtcttactctgtcacccaggctgaagtgcagtgatgtgatctctgctcactgcaacctctgcctcccagattcaagcgattcttgcaccccagcctcctgagtagctggaattacaggcacatgctgctgtgcttggctaatttttgtatttttggtagagacaaggtttctccgtgttggccaggttggtcttgaactcctggcctcaagtgatctgcccgccttatcctcccaaagtgctaggattacggatgtgagccaccacgcctggcctgcctacttctctcttcttaactcttccctagagcatcctgtatccaggccttcacctcctcattaaccacacttgtcacctcttcagctccagcgttgctccactgaacttttcctgctgtcctcagcttgctcatgatttgccctttgaaacactagaaattcatctctgcatgctgaaagacattgtagtagcttgcccttggaaacccttacttaatttagttagacgcttaaagtctctccactccacatcagggacctcattccactcttcatgggtcttctgttgcagaccctttgggggaaggcagatatcttgactccatccatttacacattcagtccaaatacacatttcaagcagcagatagtcttgggaatgcaacagcaacaacaaacttgtaacacagcaagttaaatagcatttaatggcactagaggagttctccttttgagtcatcagcttgagcagtgaagaattaatttgtactggaaaccatcaccagcaagtgtgttttgtgtaagtgttcaccaatatgctttctgtggctgcaagagcacaggctgttgatggccttgtggtcagaagtgtgcaacctggaatcagactgcttagttgggaatccttgctctgcactgactaaccagtgggcattggcaagtcactctcactgtgcctcagtttcctcatctggacaaaggcaaacatgacaaaatgagataatatattttaaactacttagaaccatgcctgcaacctaggaagccgtcaaatgtaattcattatcataatatattatttaatctttctgactttgtctttcctgctgtaaaatggaaatcataataacaaacttttattttaaggagtaaccatgatagatttaaagcaccaaagcaggagacactgtaggagccaaatacatggtagatagataccattttctggggtttcatttatatttgttctctatctcccttttcctactgaggctatttataaattcctttttcaaaggaaatggtttctagaaacatctagaacctagtggccatcctcagcatggtggatctttggtagcttcttactgcctcactctagagctgaacactggatgagaagcccagaaaagtttggtctcttgtctgctaactctgtttaccaagactcagcatccacctccaggaagtcctccctgatccctaaccccctaccaccttggtgcgtctgtggcatcctgagatcctatttgtcttctggagcagagactggtgtcattcatctgcatatctattgtgactaacagactaagttctagtaagtaccaaagacttcctggttcaatgaatgaataaatgaatgccagttaaaatctatttgaaaactggccaggcgcagtgtctcatgcctgtaaccctagcactttgggaggctggggtgggcagatcacttgaggtcagaagtttgacaccagcctggccaatatcgtgaaacctcatctctactaaaattaaaaaaattagccagaaattgcttgaacccaggaggcggaggttgcagcgagccaagactgtgccactgcactccagcctgggcgacagagcgagacttcatctcaaaaaaaaaaaaaaaaaaaaatacatatatatatatatatatatatatatatatacacacacacacacacacacacacacacacacacatatatacatacacacatatgtgtatatatatatattttttcaaatatatatatatttgaaaacacacaaggaagctaccttaagaaatttgcagtatgattcattttctcaatacaacaatactgaatctcacaagagcactatatattgtatccctttttttaacctatctccaaatttcacagttaatggaaatatgcccagaaagtaacccccaaagtatatgccaactcagctacatagatagtcctttaaacctctgtattttctcctttacattttgttgaaacaccatttcattttcttatgctctctataaaaatattttgtaactacgatattataaagtgcttactttcatagcaatggagcggggattcatttgtgagtggattaggattgcagtttgagcagggctgctgcacaggtgtaatggatgcacaagtaagctccaaaatcccaaccgctatcatacctgagcatcatacctgccctgttcctccccatcataactgtctgtagctttaaaggcttaaagacagaaatgtcttcccattttggtcaacctgaaaaataagaggggcttctagaagcctttgttcagctggcagttttatatataaccaactcttttttttgttttttgtttttttttgagatggagtcttgctcttgttgcccaggctggagtgcagtggcgtgatctcggctcactgcagccttcaccacctgggttcgagccttctgtgtagctgcctcagccttctgagtagttgggactacaggtgcatgccaccacacaaggctaatttttttatctttagtaaagacagggttttaccatgttggccaggctggtctcaaactcatgacctcaagcaatccgcctgcctcggcctcccaaagtatatataaccaactcttaattgttgagcaagtagaggaaagtaatggagtacaacccacatgatggagcagaacaacgattggtcatgtttgattttgccatatgcggagcaccccacattgccttgtacaaggtggaggcatagtctctgctttacccaagaagctgagaattctcatatagcaactaccacttaaaaagataaaaatgggctgggcacggtggctcatgcctgtaatcctagcactttgggaggctgaggaggacagatcacttgaggtcaggagttcgagaccagcctgaccagcatggtgaaaccctgtctctactaaaaatacaaaaattagccaggtgtggtggcgcacacctgtaatcccagctactcaggaggctggggcaggagaaccacttgaacccgggaggcggaggttgcagtgagctgagatcacaccattgcactccagcctgggggacaggagtgaaactccatctcaaaaaaaaagataaaaatgaagtaaacatcagttttctgcaagcgttctcacagccctgcaaaatgtggccaaggcagagaatgcccagaacccggggccgtttcctccaggctgtctcctatcctagaattccaggggctctcatgccaggccccacaccaaggacccaaggagacggatgggccccggtgactgtggtgggcctcatgctggatcatttgtctattaagtttctatttattgaaaatgaatgtggaatccaagacatacaacaggttgatatttttatcatttttaggatgaaaagcttaagcccatgtgctctatccatacaatacagtggaatattactcagccttgaaaaggaaggaaattctgacgcatgctacaacatggatgaaccttatgggcgttatgctaagtgacataagccagtcacagaaggacaaatgctgcatgattccacctacctgagtcacttagagttgtcagattcctagatacaaaaagcagaatggtggttgccaaacgctggggaaagcaggcaatggggagttagtgtttagtgggtgcagtttctgtctgatggttgcacaatagtgcaaatggacttaatgccattgaactgtacatttaaagacagttaaaatggtaaatttttaattatatgtattttaccacaatttttaaaaataaaatttttaaaaattaaaagcttacacacacacacacacacacacacacacacacacacacagcatgtagggatcacacagatgtgagcatgatgccccagtgttggcatgagacagtcgctttccttagctggttcctacacagcgcggctcctggacgcgcagcttgtcgaggcttgaaaggcgcgggcagggctgcctccccttagctttgtagaccgaaggtcgtttactttggcatttttaacaaagatttaaagtttctggaatttgccagcctgcttggtcccgaggcccagattaagcagcatgcacttttttccttaaacgcagaacaatggcagacggcatgaaagctttcccagggttatttttcccttgaagtaacaaaaggggagacggatgaggaaaaaacacccacatggaatcaaataccgcagaaagcaaacttcaagccacgtgatattagcacagaagggaaatgggaggatgggttaaaaccgtgtgaagtgctcagagttctgaagtgagggctcttaagctatttttagcctcaaaaatgctataaatcctgttatcccattacactccagtggatcgaattatttgcttttctctacctttaccactctaatttttttttgtttgagtaaatgagagcaggccttctcagaggcagctgacatcagacagagacttcctttgcggcctctctggttctgttcctctcttccccgtagctggtatttgtagtgacacctgggagccacagatttgcttagcaacctttctccagggtgaacagggtattcacaactcctgaaccaaggcgtgtggctggtatcattttgtggggccagaacgcattgcgtggagaaattcagtgatgacctggtccccacgcctgctgctcagggccccatcaccctcgtgactgtcagtggtgctgcttcccacgtctcctaagagggcttcaggagaacgtagaacgaggtatctgtctcttcctttcggacctggcctttccatttggccatatgtcagaatttccagctgccctaggggcccaggaatctgtattttagttgctttccaaataattctgctgcccagctgtatttggagactatagccttaaatcagtgattccccgtcagtggtgactcatgaagagcttagatgtgggcctggtgtgtggttggtggcaaggggagtctttcagatcccttctgcttgttgctgttggtggcaggagcgtgcatgttatggtggctcaggcctaatcccatctgtttgggcatctcgcctgtctggaaaacaggtcccggagccatgcacaccaagctcctagggaaggcagagagcactccccgactcttaacaaagacatgtggaggtggacgtctgcccttaagcactcagggttcaagaaatgctgcaaagaacaagagctgcagccaccaggagatgcaggtgactcccatggaccagaaaaaggacagaaacatgacagaaaactggtagaagaaccaaagaggtttggcatttcacagggcacctgactctggagcccacagtcaccctcctcggggccctctccatcaacgtcatggatcaagttcctcctgatgaccaagccaccaaagagagctgatggttatgttcagttgactctgctgaggcagtcagggcagtgtgatctcctcctgggaattgctgtatttgaaatgattgaaataggctgggcgcagtggcttatgcctgtaatcccagcacttgggaggctgaggcaggcggatcacgaggtcaggagatcaagaccatcctggctaacacagtgaaaccccgcctctactaaaaatacaaaaaaattagccaggcgtggtggcaggtgcctgtagtcccagctactctggaggctgaggcagaagaatggcatgaacctgggaggtggagcttgcagtgagccgagatcgtgccactagagtgagactccgtctcaaaaaaaaaaaaaaaaaaaaaagaaatggttgaaataagagagctttctggaagagttgcttctaaagattgtttttctttacagttggagccatgcaagcattggccaagcagccttcagcctcccctcccctcaggtgggctcacagccccaagggttttcacgggggaccttgtcacttgagagtatcctgtgagtgtcatagcacccattttacacagcaccatgtgcattttctgatatgtttttgcaccctgtgattactgttccaaccttcattggtcaattgaatatggcgtgactcatcacccaagcagcttggcttggcatccctcttagggaaccccatcatttggctcaagtgcagccgtgtcttcagccggtgcatcctttttatttcatttcacatactgccttgtaagaatgccaaggaccttctcttgtacaataccagggaccaagtaaaatgaaattatcaaacagtaaacatggctgaaacactacataaaaagtgctggaaacttatagtctggggcctgcagaatttatcagttacgtgtggtatagctaagaccagagtgctgttctttgtaggccccgtggacctgccgtgattgcaaaaagtggtgacgagtcagcattcccctatgtccacggaaggttgtttggcagcagctgagacaagcagcctgtgacagaagacagcctccagggaccaggtcagtgcgtgtggccgtgcaaggagcagtggccctggctccagatgctagggaaagctgggcagaaggcaaaaaaatatagaggactgtccgaggagctcgggagggagccaggagtgaggcaagcagcattccctgacatttctgcctaagcaagggctctgcaggccaggaggagactgtcacccacaacggaatgtccttctttggaagcagctgaggacctggaaaaccagcagttcctctttccagcgttggacaaggacatgagaaagacccacagcaacaagctggagaatagctccctctgtgacattgaagcaagaagaaaaggcatggagagatttggctactttgtttgttcttctaaaggaacacctggttttaaccgtcaactgaaatggccgtgtgtggtacattaagttcagtaagaatatacactttcagctatctgctaacagaatcaaggtaactttgcggttttgtttcaaaaaaagttttctaattttggtggcattgattttgtagattctcactgatacccaattataagggagagatgtttacttgtttgaaattcatctgagtccaaataatataacctgggttttaaacgttcaccgctaatttttttaaagacactgtaaattatttaaaagaaaatgccttctggccaggcacggtggttcatgcctgtaatcccagcactttgggaggctgaggcgggtggatcacttgaggtcaggagttcaagaccagcctcgccaacatggtgaaacccccatctctactaaaaatacaaaaattagccaggcatggtggcatacaatgtaatctcagctacttggtaggctgaggcaggagaatcacttgaacctgggaggttgcagtgagcggagatcgcaccactgtgttccagcctgggcgacagagcgagactctgtctcaaaaaaaaagaaaaaaaaaaaaagccttctaaatattttcatgaaggtgaaatagatctccagggcacatgttgctaaacatgaatcatttgcttcattgataattatattttaagataaatgttattgtatttagggtttacaacgtattacgggatatgtatagacaggaaacgggttactatagtgaagcaagttaacatatccatcatgttacagttacttttttgtgtgacaagaggagctaaaaatatacttatttaacaacagttcctaatgcactacaatgttattaactacaatcctcatgttactctagccttgctgaccccccctcacctgctactttgtatcctttgaactctacttcctccttttctctctcccttccttccatccgtcccaaacccctggtaaccactattttcttctcttatctctgttttttttattccgcatgtaagtgagatcatgcagtatttttctttctgtgtctgacttactttgcttagcataatgtcctccaggcccgaccatgttgtgggaaatggcaggacctcctgattccctttttagagacagtgctcactgtggccaggcctttcttaatatcgtgcttcacactggatatggtgctgtgttctttgcaaaaggatttcacttttttaggttaaaaaacaaccatcaacaagggacaagatgtgtcctagcagccactcaaggagagaggctccgaatcagtggtcaggagagtcagctctggggttggccactggtggcctgcacggctgagggctggtccctccacacagggacaccgggcccacttctgaaaaccacatttcagggtgtctttgacagtcaagaagtggggagcaactgaagatatttggcctgaaatgggggacctctgggggggacaagatcactctgctccaatatctgaaggccaactgcatccctcggatggctttaatttaaaagaattcttttgaaatagaaaataacaagtgttggtgagcatatggagagattggaacactcatacatggctggtaggaatgtaaactggtgcagccgctgtggaaaacagtttggtggctcctcaaaccgttaaaacatagaattaccatatgacccagcagttccactccttggtctatacccaagagaaatgaaaacatatgtccctgcagaaacttatgttaacttatgaacaatgttcacagcagcgttattcataatagccaaaatatggaagcgacccaagcacccatcagtggatgaatgaagaaaatgtggtaccatatgtatatatataggaatattattcagtcttaaagaggaagcaaattctgaaatatgcccgaatgtggagggacctcgaaagcattatgctaaatgaaagacgccatggcaaaaggttgtatagtccctctctgtgaatatccagaaaaagaaaatcccttgagacagggaattgggggaggtgggagtgagagcatagctcagtgggtacaggctgtttctctgaggaaataagaaggttttgaatccagagaaaggtggtagttgcacaacattatgaatgcagtgaacaccactgaattgtacatttttaaatggttaattctatgttatgtgaattttacctcaatttaaacaataatctgagggctgtcattctgtgtgacccctggacatatggcaagaggaaatgagtagaagctccaggagcacagcagggaggagggagagcagtatttttgctcagcaggaaaaactgactcataaatacaactagtaggaaattgaagaggccgcccaagaaagcagcaagtgcaggggactgtagagtgcctgtcgggtgctgcactcaaccccgagagcagcagttctcaccccgaggacacgtgggattcacttggtggcacaagaaagccacacttgggccccaccccagggatgctgacgctgttggcctaaggtgtggactgggcatccggacaaaggcccctggtgtcttagctttaggtggaaacagatgaccttttgtgtccctcccatcctacctcggccccaacagggatttctgttttaatgactgtggtgcctgcgagcctaggatcatcactgttcagtgtgagtggtgtacccacagcatccgcctcacctggaagctggctgggaatgcagcgtctcccctccccacccccgcccagtcagaatccatactttagcaagatcccaggggacctgtgtgcccatctgagtttcagaagtgctgctgggccggggcatgggggctcacccctgtgctcccagcactttgggaggccaaggcaggcagatcacttgaggccaggagtttgagaccaggctggccaacgtggcgaaaccccatctctagtaaaaatacaaaaattagtcaggcgtggtggcaggtgcctgtaatcccagctactcggaaggctgaggcaggagaatcacttgaacccaggaggcggaggttgcggtgagctgagatcacagcactgcactccagcctgggccacagagtgagacttcatctcaaaaaaaaaaaaagtgctgctgtcgatctttatttacaagacacttcgaggtgcttttcctcattttatcttctgaacaatcgctggtttgttcagctgtttgacaggggaggaagtccaggcgcagagggcttcactcactccacatgccacggacagtgctggtctcccacgtgccccattcagggccttctcccccaggtccagggcctgcttcagctctctgtgacacccaccacctccctcatgtgctcgcagtgccctgcccggagcccaggctgggtaattattgggtatgctgaaactgctggggctggggagaccccgtgcctcagcttggagcctgatgccatgggaatcctcaatgcatggctcagcttgtcattagcttttccctttcttttttcattctttgttttgaaataattatagattcaaaggaagtcaccaagaggttcaagttcagtgtacccaccacctggtttcccccagtggcaacatcttaacgtcactatagcacaatatcacccccaggaaggcggcactgccacaggggcctgtagaattgtgtcatttgccacatttgtggatttgcgtaaccaccacccatttctttccttgacttaaaacaaaaaaacaaacagctgggcgcagtggctcatgcctgtaatcccagcactttgggaggccaaggtgggcggatcacaaggtcaggagttcgagaccatcctggctaacacagtgaaaccccatctctactaaaaatacaaaaaaaattagccgggcgtaggtggtgcatgcctgtagtcccagctactcgggaggctgaggcaggagaatggcgtaaaacccgggaggcggaggttgcagtgagccgagatcgcaccactgcgctccagcctgggagacagagcgagactccgtctcaaaacaaacaaacaaacaaaaaacggtggggtccccgaaaacacactttataaagactgatttcctgctggcaggagagagagctgctgtacatcacaaagcaaggcggcccactagagtggtatggtcagcgacctctgccttgcctgggtgaagtgtctctctctctgtctctgtctctctctcacatgcacacatgcacgcacacacatgccatgcactttctctgtggaagacttcaaagtgtttggtggctgttctgagacctgttcctcctcggctgggctaggggaggggcccactccttttacctgtgtttctttttagaggagaaactgacacaaagtcagatagtcttggggatggaagttgctctcatctgtaagaaaaggaaactgacctaaccagcaggtaatcacttgaaatcacttgtgtcccgtgctggaaacagctccacagcagtgtctatgatggattggaacctacacagctagaggaagaatttgcatccagaaaccacaggagcagatgacccacaagtgtagctattttacttctttcatgttaaattccaaataaaaggatgattatctttgaactgaccccagtccaaagtacaaatgcctggctgagatccaccaaggccagatgttgtcatcagtgactgggtttatgccaggctatcggtgaactgggtcagagatggtgcaggcaaggttgctgggtcagggcaggttcacagcccagtcattcctaaccaagaacatcagcacctgactggagggtgggaatgaggttcctgacctgctgactcatttgcagagtggtgtgtcagagccacacacggtagcagcataaacctgaacttcaggtaaccacacgccatgggatgctgcagatttatgtgcccactgcttgcagctgagaggaccagcatgaatggctctaatttgtcaccatggcacagtcacagatggagaatgctctgtcataaccagcgctcccagtctccatgggttcttagcacccttccccatccatgtttacctgtacagccacctgtgcaggtcattcttgcccagaatagtacatgagctaaacagccatcttcaggtggttataaaacctcatatttatatgaggtttcatagtttacaaaagttacttcttattccacctaatgaagaaaccacagtccagaaaagtttggtgcctcccccgaggccacctacctggtcagtgatggatcagcaccacagttcccatcttctcattacacctccctactggttaaggccccagcccacacagagaagtgtttctgtttcacccctggagagggccctgaagcatcttgtgagtttgtggaaagagaagaggagcagctcttgcttccgtggggagcacagccagactcctgtcttcatgtcctgtcccttaaatgccctccaaaaccgggggcaggtgctcgagagaacttgaccctgattccggattatggggttttctaaactcagtactgtggctgagatctgtggggcattttgcaagctgcttgcttttgtgtgaaacccctatatttgtcagtattttaagtttctgtgaggctgttcttgaattcagttcctttctctttgcctaaatgcaagccacaccctcatctcctcccgttgaccatataagaggtctcaagggcactgaggaacttagcagaaagcaaacagtaccttcagaagattaaaaaaaaattattgcatttgtttttctacaaccaagataagagacagtagataaaggaatgtgtatgtcttgtacagctcactagccccaccatctctgatacggaccagttcttcctgccccttgaataagtatcccttgtcttatcatagtttacatcctgctgtgatgccatgtgacatacatgctctcgcacacacattattaagacttcactccttgtgatcaaggctgagaaagattgtggtggtgttattgttaatataagatttatgacctcaaaatgtttgcaagcttggggtcagagatggagcattcctcagagggagtcagcctggggtccttcttacatagacatgaacatagtttctccagagcaaggcagaatacacagtttaaaccatgggaaggaggaaagactcaaaggagtgatttagtaagagtataggtaaagaagggagaaaatattagtatttctaggagagttagaaggacttagtacttctgccgttttgttttaaaatatatttttttaatatataaagagacatcttggctctccctaacgaaaatggcctaagatcctttatatatatatataattttttttttttgagacggagtctcactctgtcacccaggctagagcgcagtggcacagtcttggctcactgcaagcttcaccttctgggttcacgccattctcctgcctcagcctcccgcgtagctgggactacaggtgcccaccagcacgcccagctaattttttttgtatttttagtagagatggggtttcaccctgttagccaggatggtctctgtctcctgacctcatgatccgcctgcctcggcctcccaaagtgctgggattacaggcgtgagccaccgcgcccagccgatcctttgtattcttaatgaaagagggaatgaattgcaatgaatatgtactgcttctccagaaaacagaaaaatttttaatgtttttatttaaaccagacatatacttttttatttatttccttgttggtttctttttcttccaaataggttgcaaaaatgaaatttctgtttaaatttataacatgcaagagtatatgtgtatgtggccttggaatgattatttagttttgttccaaagatctgatagtttttaaatgaactctataatttagggtactctgggaattgaaaacttcgtgctttatttaggtaaagatatcctgaattgcttacttaagtaagtcaagtaaatggaacgttctttgtgataatgctgttgcattataagaaatgctttgaatcataggtaggactaatgtatagcctatttatttatttatgagatggagtcttgctctgtcacccagactggcatgcaatggtgtgatcttagctcactgcaacctcccccagccaggttcaagtgattcttctgcctcagcctcctgagtagctgggattacaggcacctggctaatttttctatttttagtagagacagcctagccatattggccaggctggcctcaaactcccgacctcaggtgatctgcctgcctcagcctcccaaagtactgggattacaggcatgagccaccgaacccggctagccaatttattttaacagcatttcactttcaattttgttaaatttggctagacatgtaaaatcatttatttaaaatttaaaaatccaaacttctccctattttgtccagaatttcaaaattgcagtgagttgtggtcgcctggaaaccaggtgtatgatactttgttaagcacactaattggcagcttggagttttgcattgcagaaggctcgttagtgagggtgggtgggaatccacactcctccaattagtgggcccccaagccactcgcacatttaaagtatgattcactttacccaagtttgtttgtcttcagctcttcaggaaaacactgttacacaagccaaggtctcctatccagcaaccttttggatcccgaggtctgcacataaaaggacttgctctgcaggctccctggtagctggtgaatatcttgggaatttaaatatgaagatagttgatgtccatagctaggatctgttatttaaatgtagaagcatttaaatatgcctttggagttgtttttttgcattgtgatagtagccaccacctgagctaacaattcattgagttttatgctgtcccacattctagctgctttaagggattgtgttctcaggtctcacagatggcctgtgaaggggagaaactgaggcagagagggttaggaacttgcctaagctagttaagcaacagtcacgattagaagccaggatctttcaggactgttcccacgttatgcgagagtccttgcctctcttcataaatggtagatttcccatctcctttaatatcctctagatgaattcatgaacaaaggccaagggacaggagaaagagagaaaggaggaagaaatgatgtcagctctttccttcagttcttaaaaatgccaaagacaaaactttcagacaaggtcgtttcctggaagaggtggggtaaacattcccagagtcatgagtttttagatttgaatgtttctaaaatgttgattgacagaaccttctaatacatttgttataaacgtgacataaaggggaaaaatgtccagcattttgaggaagaaagggctctaaatatacataactgcatttgaacagattcctttgcttcctcgttggcctgggctgcaaggccactgtcctcttatgagccctaggaagcaggactggcctcctgaggaccccagcattagcctccaggtttgtgctgggccctcctgagacaaccccaatccagacactagctcctataagtagagcacctgagactcaggggaattccctcaaagcgttccagcttctgagccagagaggccagaagtggaagcctttctgtcggacagctacagcccagactggatgcaggaacagcaggaacagagcagtggcctcctccgtggcatggggccttgtgcccaccaatcctggcaccactgaaccactgactcaagtccgtcctcagctccagtgagcctcttgttattgccagtggctgacggagaggtgaggggagaggacgtcatgcaggcgagctgggaggtagcaccacggtttctcagcagtgttcgtgcaaattatcactataatgcacccgtgcaggcccagcagcctgtgcaagtatcacagcaccatacagacatgaattcatgtgtctttaataacagggaaatggcaatgtgtcaatttacacagttgtttttctgcagttttttctttttctttttttttttttgagccatcttcccaagtgttctctgggttttcctcttacccgggtcccctgtctgccatccacaggctggcatgagccacccaggctgggtctgggatcagccgagggcctgggctggtgccggcaccgcccctctccgcgaacgggccctgcattcgcatcattagttcatcaccatggaagaactgggctgtcaagctgacctacttttcttgtttgcccacagcaggctaagcctgtttagcctcatccagaggggctgggcagagcaagttgctttccgagtcatacagatggcagtcttctgagtgagtgtggttgaatctgtttgccctttttgcccttagtctgcagagttagggcccagcacccaggatggcttgagtccaggtccaagcacaggggcatcctgcaacccatattcagcctctcccgaagagatcctgcattaggatgaattattgcgggaaccaatgccaggcttctttccaaactttaaacacagattcctaaatggaagctcttcatattctatactaagccctaagaacatcagccacttgcagagatgccaggagggtgggacccatgcctgtgcttgaggggtttaccatccagtgggggagggttgtgaacagctaaagccaaggagaagcagaaacagaagaggatagggatgagccgtgggggcggaggaagatgcgctagtagggtagaaagtgttggagagggggacaatgtgatgaggatggggctaaagtcacagactggcagcttgtcatctgagggtttgaatgctacgatatggaaccatgtgaagtgctagtagatgtacatgttatccccccaccccatagttactacctttattctttgctgaaatattgctatattgctgcctgtgaacataggatagtatctgttagagttgttcaggggaaaatagttaagatcagacccagactgtcatgattaaataagctaatgtacaagaaaaccactagccagagcttcatgtgtagtttatctctcaagctcatggattttgtgtgtagcaacatgccttgggtcctgggcctgtgccttctaattctgatgccatgacttctgactcaggcggacatgtcttggactctccttgacaccccgaagccaccacccagagctttggaggaggaatcgggccagtgggtgaattatgccttaactggggccacttctttagacatttgcagaaggaggaactcagtctctttttaaaaagaaaaatatgtacttctcttttctcttgcagtttccccagcattattcagaggcagagtgacagatgtaaggagagggatctaaaacatctttaatatacaacatgaatatctgaatggacattgagaaactggagatttctagtcctgctgaggcaaaacccagatgacctagagatgacataaaagtcagtcatttctacctgtcccattaccggtgatggtaatgtttgtcactcaattaaggcagtagctcttctttagacattcagcaaacatttgttgaatacctgcatgggactctgagtcttggtgttcgaagagggaaaatggaaatactcggccctacattgcctaagcccctcactagggagagctgtaagctcttgggaagggcttgccacggggctttctgtttgttgaggttcaccctgtatccagtggctcttctagcacaggcagagacatgccctttgccgtgtgacattcgaggagacgaccagtttttttccctactgacctatgatccccacatcccagcttctctgcctactggttggtcttcctgacattagttttgttcttgtgtatttgatccatgcacacatttttaccacaccggatatcctgaagttgggctggttggggttttgggagaggcatgtctagggttggttcactctgtggattaggatctagttttatcaaggtggtgggagaaaggcctcaccaggcagcaatcaccaatggatcccaaattcccagctgggcctgcatccaacacaaccaaccagggttttcagacaactcagattttaaaaagaaaagcagcaacctgtcagtttggtgacctagcagatacatctcaatgctttttactttttaattgactttttaaaaatggtgaattaatgccattttccgtatgaatgcatcattgtgtagatttgtgtagatgccttggagacgtcccctgagattgagagcgtggggtgggcatgttcaggggcggggagggatatgtagagcaactagaaggattgaggttttccttgcgtgcacaccctcctcctggcagcgtgcagtggtgagttcctggttcattgggagtgaaatgggcaccctcctgcttctgtgtgcatactgtatgaggtatgtagctttgccagatcttagtgtgacacaccaggatgacagctagcaaggtcacgtctctgagggttgttaggccccagccctggtataatgcctctgcaaggcatgttggtcccctacagtgggccggctgtgtccagggagcaggctgggctcagaggtagtgcgagctctcagctggcctcagggcccagccaaggcccctcatcatctctgactatagggacaggtgggtgcagggaaggggtggcaaacttagtaacgttgatctccttgatagtttctacccctgaatgcacctccacacaaaattgtgcaggccttcccagggaccctagcctacggggaatctcggggcaaggagaggtgcaggtgctctgggcagtaccacaggtgtccctgtaccctcaggtcatcaggcccaaatacagtgaggagccagccactcagagccacttgaggggctccaaatgccccattttctcatgccccagggcctttgaacaaaccattccttctgcttgcatgcctcttccaggctcagctgaattgcatgatacagtgacagtggaaggagtggaggaggatccaacatcacagatactttaacagtgaatatgttaaatctaatacatcataagagagtcccgggtgtgaaggaagagtgctccttgctgctggtgctgtcccatctgctccctgcggggccccttgcagcccgtgagcttgacttggccttggctgagtcagcaggggtggtgggcaggagacccctggctgcacagggagggccagcagtgtgctgtctgcttaaactgtaagtaaaagaagtgaggatggtccaggcgcagtggctcacgcctgtaatcccagcactttgggaggccaaggcgggtggatcatgaggtcaggagatcgagaccatcctggctaacacggtgaaaccccgtctctactaaaaatacaaaaaattagccgggcgtggtggcaggtgcctgtagtcccagctactcgggaggctgaggcaggagaatggcgtgaacccggggggtggagcttgcagtgagccaagattgcgccactgcactccagcctgggcgacagaatgagactccatctcaaaaaaaaaaaaaaagaagtgaggatgacaggagaaggtagatggtgcaacatgagggtgctttctaccaacaaggtgtgcagcattggacacgcatgaccacgtgacctgcagctctgatggtgcaacatgagggtatgtcctaccaacaaggtgtgcagcattggacatacttgaccacgtgacctgcggctctgaaggtcccacctgttctcgttctaaagtcaccatttctgaccgctgtgctgtggaaggggaggcaattaaccagatgaggcgtcccaacagattctcctatcgattgtgaaaagtgggtccacttcagcttacagatgaggtcatcatgcccaggctccaaggccaccacacaagtgaaggcaagagcactgaggacatttcaacctagatctggctagtttccaaactaattctgctgcctcaattagcaattcacatcaaacctcctacgttttgattaaatgttatttgaaactcttgatattaaacccaagattccacagtctaggtgtccaaaactaatttgacttcctgtttcaagggcacctactttttctctccttgcaaacttgagcacagtgaagatgagcatttctggacctgaaggagcatttggggaacagttccatggagggagatgcttgctggagcagtattttgtggattcatttcggcttgtctgtggcagccgaacagcggtttccaacaaaggctttcactgactcagctccaagcatgactcgtaaatctccttttcccctcttgctgatttttctaggcatctattgtccacaccctgaccacacactgtcacccatcagagtccccagttgactcaggtttacactgtgccatccgaactcttgatagagagtccccctaaaaggaacctgaggtgattgcaacataaatgtcaaaggttgcaagaataatatgttgtgttaggatggcccttccatccagatatcatggccgtttctatcttgagaattatttgctgaccaaacgatgttacggtacatttacttaataacaaatttttcaactttcttcatccattccttcactgcatatgtcaccctctctctgaataatgaatcatcagattcttggaaaaaggaaatcatgaaggaggaaccatggttgtaacaggcagataaagcttcagcttggttttttagacactcgtggtagcgtttgcgtatggtcacgacgctcatgagagtcttgtcttggtttcttctagccatctggctctatgaggctccagcaagcaccgtgagacccggctccttgggacaaggctggagagggctagtgttaggattggatctgtccgccttgccgtttccaggtcagagaatgtgccagaatgcgatgagaactccctagttggaggggaattgggattgcaggagctgccggctctcaggctttcactgtccatctcctttagaaatttattttttattttatttatttatttttgagacagagtctcgctctgtcgcccaggctggaatgcagtggcgtgatctcagctcgttgcggcctttggctcaggttcgagtaattctcctgcctcagcctcttgagtagctgggattacaggcgtgcaccaacacacccggctaattttttgtattttcagtagagacagggtttcaccatgttggccagctggtctagaactcctgacctcaagtgatcctcccacctcagcctcccaaagtgctgggattacaggcatgagccactgtgcttggccttagaaatttatcttttctcactgaatgaatcattgcaacaccaaaagccattccctggagaggaagaatcacaatatggaagttatttcctagcttccccaaatgacaaaggaagataagtgagcgtcgcagttcatcagcaactgttgctcaaaggctttttattccttaacataatgaggaaaaatcattaccaagctcccatgtgtgagatacagacgttaatccaaaacgacatgaggtcccctcaccagggactggctgggaggacagaaggtacacactctgtcagcaataaataaacccccatcaattggggagatgtgtgtgctcggttttgccttttatgattccaacttgttcttgttttctgtatttttttcttttgattaaattctaccaggcttggttggtatggtggggaagagtgttaggattttccagctaacttgggacctgtaattcaaaccagttctcagccaatttcaatacatcatgattttatgtttgtgaaaacataggccttgcaacacaacaggcttggggtagtcatttcagggaaaattcatgatgatacaaagtgacccactgggcctataaagactttacaaaaaattctaaattaaaagacactgaagaggaaagtttagtcatgattccagtgattctttaacatggtttggcaaactgctgtctggggaccaaatctggcccacaacctgttttcgtaaataaagttttattgaaacacagccatgcccactcatttacatgttgtctatggctgcattgcactataatggcagagttgagtggttgcaacaaagactggatgctctgcacctaaaatagttaccaggtggccctttggagaaaagggttgctacctcctgcatgagtggagtaacatgcctttccgtgcgtgctgcatgaggccctctctggagacctgggtgagctgctagtccctgggggagactgtcacttgtatgactcattagtcttctgtctcactgctgacgcacttgggacccagggcggatatgccgtgacaaaataatcctgctgccatttccaggtccccatttgccaggggccagaattctaatcagttgtgtagtaggtggctgtgagaaagaatgttctaaagcctttggggcagaaatttcacctgggtgtgtgaatgtcatttgcaggcttcacttttgtcctttgcttcagttagagtcaacagattttttgagggtctgctgtgtgaaggaaaaccccagtcatttcacctgatagtcattccattcccttctctccttcctcacaacctcacaatggccggttgctttcctgtttagttatgagcggctcagggtcagtgataaccaggtccatgcatgtttgtgtctctccacaaggtcagacttttattgacgtgatttcaatcacaaaagctggaagctccattgagttcccaaggaggaacttccccttactacttcccattcacttaggagtcagagccgcgggcacacaggctcaagccactccacaggtcagtcagtgttgcaaaccatgcataatagtacacttatcaataaataaatgattaaacatttcacaataaatgaagtaacatttaacatcaaaagaaaagggttaatggaccagtccagggagagcaacatgaaaaaaaaaagaatgtcctggcctggtctgggcagtccattggtctcacaaggaagagtctttgatgtgggcagagcattgggcagtggatgctgggtgctgatcacaagcgacagcaagatggagtctgtggggacagccatttctagctggtgaagtactgctcttatggccgcagagtcctctggtgaggactgagtggaggaatgtacttggttatgtccttgttggaagcagtcttcattgattaggcaaaacatccagtcttgttggcaaggtgccttttaaaatgtaagatggagtctttctctaagatggagtttactgtgtcaagggtactgtatagagttatcactagctagtccagtattctagacagcgtatgtgtgtctgtctgtccatcatgcgtacacacacacatacacattttcaacactggtagaagggaatgattatcctgtttctcccaaagacacttgttgggcttaagtaccagtttctactgtgagccctttaattcatgatcattagtgatagtgtgattaaaattctgcagctacaattttgtgatgacttatttgtgccggggactgtgctgggggcttcccttggactctcttatgctgtctcacagccaaacagtgagaaaagctcttctgttctctcactttgcagttggggagctagggctgggagcatcacacttgtccaaggttatacagagatactgaagggcaaagcctgggtcggtctcagtttgggtcgcctgaccccaggccaccactgcctttctccccttcacagatgtggatgctggacccaggaactctgacacccagtgtgccccagtagctctgcctgccagcagcaggggtggctgtctgccaattcccttaggagttccagccctcctccccgcccctccacactcagtgctccactggccttgcttgattagattccccagctggtctgtttactgggcctggcagagctccttacccccatgcccccactcagtggtcctcacagtcctgtttgcagcagccacaggtagtccctaggggtggggcagactcaggcttcagctggagcccctgcctgcgggtgcctcttggctgtaaggcactcttcctaccaatatggccttttctgtctctgtttaggagcccctctctgaaaccttaggtctgtgtgaccccagagtccatttctgtttcacccctggtgacctccttactgtgcagagaatgtgttcgttgaaattcaaagtagataagaaaggctgaagctcagtgtcacctcccttagcaggggctcagtggccacagtgtgaacagaaggggtaggacagttaggtggggcaggtgtgcaatgaatggaactcacctagagctttctgtgccccaggcatcatgctgggtcctttattgcacacatacctgtgacctgcttcctgtttgcaccttgcacaattgctgcctggtgggtgttagctgcattgtgttaggaatgaggggaacgggctcatgaggtttaaggggcctactcaagatcatagagcaagtaggttggaatggagatttaaatcagactgactctgaagtcggaaaccccctattctgagcagcagtggctggagaaaggcctcctgagtcagtgccaggaggcagagcccagggtctgctctgtccccaagcctgtgtctgtgggcaggccacttagccttgctggggggtggtgctgcctgatttatgagtggaggataactatagccagcccattccacccacagaactgatggagacaaaatgagattatgttttttcagaacttggcagctgccaggggttggtgagggacccattgggccttcctgaagagccctggctgccagtgctgtctgagtggattttccctctagtcagtagctcctgcacatgcagaagtttttgttttaattttagtcaccaggatataactgtcccttcaaatgtactttgtaagcactattaccttggagccaccacgatcatggggaggtttgtgggagtgaatgtcaggtagtggcacaggaattcagatgggggtttggccctggctttgtccttcctttcctccctccctcccttcctcccttccttttcttcttcattcctcatgcatttattgagcacctaatatgggtaaggagcttgtattagtccattctcatgctgctataaaggactgcctgagactgggtactttataaagaaaagaggtttaattgatccacagttcacatggctgaggaggccgcaggaaacttacaatcatggcggaaggggaagcaaacacgtccttcttcacatgatggcaggaaggagaattgctgagcaaaatggggaaaagccccttataaaaccatcagatctcatgagcacccactcctatcatgagaatagcatgagggtaactgcccccatgattcaattacctcccacctggtccctcccaggacacatggggattatgggaactaaattcaagatgagatttcagtggggacacagccaaaccatatcatagctgggcgagccatcgtgaaatgggtgaagatgcaatttgcctaatccttgccatcaaagtagagaacctgtttttgagtgtctgctgcaggccagactttgcaaacttaagttcatttaagtttcaccgctgtcctctgagataggtgtctgtcactcatgttcaaaacctccagtgccttcccgtctcacataaagcaaaagccacaatgcccctctgcccctggctccacctccccctcaccaaagcaatcaccgggctggcctctgggctgttcctcgctttccttgctgtctgggggaggcaccctcactgctcactcccacactcccttcaggtcacagctcacatagcatctcatcaaggaggtcttccaagactccctaaaacatcagaacaagactccccgaaccccgtcccacccaggattcaccttttcctgcactgcagtgataaccaaagaacaggctctgtgtttacttatttgcttgcctgcagttttccccaactcccctgacacatgcatcccccgcctcatgtaagcaccatgagagtagcggctttgctcacagtgggttcccccttgcccaggcactcagggagtatctgttgaatcactgtatatcacatgcagttggcacatttgtgctttggcatatacattctcctgcctcatcacagagcccaagaggagaggcaaatagaaggagatagtacacacggtgcatggatcagagacctgcacattgttagttttcctaaaattgatccccaaattcaattcattctcaatcaaaatcgcatcaagctatcactttttttttttgaggcacagggtttcactctgttgtttaggctggtgctcactgtaaccttgaactccgggctcaagcagtgttcttgcctcatcctcccaagtagctaggaccacaggtatgcaccaccatgacaagctaatttttacttttttgtagagacggaatcttgctgtgttgcccagacgactcgtggcctcaggcaatcctcatgccccaacctcccaaagcaatgatattatgggcatgagccactgcacccagctgcatcaggcatttctatagaaattgacaagctaattctaaaatttatgtggctgtgcaacgacttagaatggccaaggtaaacttgaataagaacaacgttggaaggcccaccctacatttatgtcagtaattactgcacaactttaggagttaagatagtgtggtaccggcataacaatagacaaagggtgtggtggaattgggaaacatggagttagtttgtttaaacaacagaggagttatattttcaagtgaaatgctcaatatatttccagatgaagggcctctaaatgtaaagcaatggctccaattgttaatctgatacaggttcactcattatatatctaagtccaaaagtacaggcaaaaatcatataatttttttcagcgtaataattggatctaccactttaaatttagatgtctttcacctaaaaaaaaaaaaacaaacctgaaagttgaaggaaaacacattgtgcatattacatgtaaatgtaactaacatacctcttatgagtgagtttatcgccacttcagtcgggtggccaaggctggcatccacagtgacaagccatgttgacagcatgatgtgataagaaggacactttatttcctgggtcttcctctcaaaaacccgtattctgagcctgactttgagaaaaacatcagacaaacccgaactgaagaacattctacagatactcctcaaaattgtcaaggcctgagaaactcgcagagccaaggggtgtctaaggagatgtgctgacaaagcgtgctggggtgtcctggatagagtgctagagtggaaaacggacgttacgtaaaaactgaggaagtctgagcaagtttgtctgaaaattatggacttcttttttttttttttttttgagacagagtctggctctgtcgcccaagctggagtgcagtggcgtgatcacggtgcactgcaacctctgcctctcaggctcaagcgattctcctgcctcaccctcccaagtagctgggattacaggtgtgtaccatcacatgggctaatttttgtatttttagtagagatggggtttcaccgtgtttcccaggctggtctcgaactcctgacctcagctgatccacctaccttggcttcccaaagtgctgggattacaggtgtgagccactggcacctggcctggacttttcttaataagaaggtatcagtgttgcgacaaatgcaccatactaatgtaaaatgttaataacaggaaactgggtgtggggataagggaactttctctactctctttgcattttctgtaaatctaaagttgttcttaaaaatgcggtttattttttaataagtttatcttatgtgtctttcaccccacagacatcctgattctgtcctgcagaattgagacacataggataaatgaagctaaatatagtccataaataatgcatataagatcacacactatttgatgaaagtgctaatgcaattcaacagggaaataaatgccttttaaacaaactattctggagggatgtccatattgggggcgtggtgggggtggtggtgaataatgtccgagccctatccaacactacacataaaatttaagttgcaatggactgtggatcaaaatgtgaaagctaagtgatgaagcttctagaggaaaacataggataattcttcacgacattgaggtggcaaatatattttagaatacaaaaatcgctaaccataaaataaaaggttgataaattagactttatcaaaatttaaaactgctcatcagaagacaccatccaaaaagcaccaaggccacccacagactgggagaaaatgttcaccattcatattttctgacaaagtacttgtacctggtagagataaacttctatgatcagtatgatgaagactaacagtccaatttttttaagcaggcaaaagaattagacatcttacaaaagaagatatctaaatagccagtgaaaagtgctctgcatcattagtcatcagggaaatgcaaatcccaatgagatatcataacacacccacgtaaattactaaaattaagaaatattacatgttagaatggagccactggaactccttgtacactactggtgcaaatatgaaattgtacgttcactttggaaaacagcctggcagtttttaataaagtaagcatacagctaccccgtgttccaagaatgacactcctagatatatacacccaagaggaacgagtgcttatttccacagagacttctatatgactcaacactggtgatgttaatgttgaccagtaggtgaaagtggtgtctgccaaccttcttccctgtaaaatgtttttcttttgtaattaataaataccttgagagagatactttgaaactctgcaaatatcctgtttctccccaagctttttcacattaattttagcatccatcggtggatcttgcctgcaacaatgattactatggtatgccgatggtgattttcttttcttttcttttcccctcccctcccctcccttctcctcttctcttctcttctttttcctttttgtggagaacagtgcctcactatattccccaggcaggtctcaaactcctgggttcaagctatccttcccactctcccaccctaagggctgggattacaggcatgaagcatgaagcatgatggtgattttctattgccattgttccttctacatttattaattggaatcttctgtaagaggaagctgtctccctccctccttctacctccccatttgtttatttatctgggggctctttgtaaaggtgtgggtggagagtagggaaccaagagggacagtgtggttacctgaggtggggaacgataaaacaaataaataagactcatgagtatttagtttgtggcacaggctataatcaatacggttgtcactcattttgttgctcaggttgttctgggaacccctctcagcctctcctttcatcaggctcccataattattgttactgttgatcatgatttcttgtgtggtcagttgctaggtgcagatgcctggatttcaaactgggggggatgttacaaagcttaaaaagactccggagagtttgtgttctaggaaaacccaagaaacccagaactggaagagccccagagagatgaatgttaccgggcgtgttcccttctctcttccctgacgctcccctgtgcagaggatcctgcagacatggctaaaggagatgcagcaggagatcagagggtgggtggagaatgagagtgtttattcccttggctcccttcttgtcccttcactgaaggccgcctcctatgggacacactccttccaggtttgggaagtaatttccctcttgtcccttccccttacaggtgttcacagctctgccgttccccacctcaggtaaccacactgtccctcttggttccctactccccacccacacctttacaaagagcccccctgtaagtcagcactcctcagaggatcccacccgccttctgctttcctgttgggaccctgattcacacacctcgtgactgtctacgccacgtaggacacatggttatctggggtaaaggctgtacggcatccctccattgttcactctgggggttcatcacctcaaccattatgtctcagctccaaacaaaatctcctctgctttcatttaagctccttttctgttttctggcactctgtgatcaaaataaaaaaaaaaatagatgctcaaaatccttctcactgaaaactttatacggttgagaagagtcattgtcaccccctaaacttctctgtgattcctttaacctgacctcagaggactgcttttcttcccttccatcctgttccttgtttgccttcaagctggttccagatcctattattaagtaaaagggtgactctaaaacgcaaggggggatggacacccacactcaacagcagccgaggtggaagtagcccatgtccatggacagatgaatgggcaagcaaaacactgcgtttccgtgcaatgggatatcactcggccttaaaaaggaaggagagtgtgacccatgcagcaacatggatgaaccctgaggacattatgctgtgtgaaataagccaaatactgtctggttgcacttacatgacagacctggaatagtcaaatttatagagacagaaagtagaagggcagttgcgaagcctggagtgagtagggaatggggacttcttgttgaatgaatagtttatgctttgcaagggcaaagagatctggaatggatggtggtgatggttgcctaacagtatgaatgtgcttaatgccactgagctgggcactcagcagtggttaagatggtaaatttctgaggtgtattttatcacaattttttaagtgaaaaaataacatggtagacaacagaggtgacaaaatagtaaaaatatcagcacggagcttctgtgacaggtgcaatgggaactcagcttagaggccctctcctcacactgggtgcagctcagctgaatggcttagtcgggtcaagtgagaggaacggggcagggaaatgagagggatgctgaagaagaggaaatgggtgtagagcatccaggttttatagattcaggaaatgtctgcgggataaacatacaaatcacagaagatgtggttgataaagaagagctattagtcatttttagatgtttagtttatgactcagcaaccctggtcatccaaacaggatcccaggagctcaggagagtggactgaggagcagcagccagccctcctgtggacaagctctgtccaggggcccctggtaaagaacacagcgtggccgggtccttgctcatgccctggggctttgatcagccaccattctccttggaagcacaggcttggggtagggcatcattcaatgaattgacataaaactttgaacagattccatctggaaaacattaagcacaggcctgtttgcagatgtgttaacgctgactcaattgtaatacaggctttaacttctaagcagcatttcttgctagtccattgtggaatatgcctgctgttgactgcatgggcattatgtgaacaggggctgtggctgcagaattcatctttgctttggctcagacccatgtttgtgtacgtaggtgaccaaaatcacaaaactaaatgagctcagagaaagattgattggctccattgaaaatttttatctgaaactttatatttcaagagtaattggtggtgcatttgcgaagtgctggtttgggagttccgactgaagaccctgtgtgttgagcgtagaagcgggtgggcagtggtgattcagcttctccatggtccccacctttacctcgatcacactttgccctcccagccaccgcagccttcagcctcccactcccacagctggcattggcctcatgagtgccctgagaacggttctgcttgatgtgctgacttggggggcgcaccccagacaggtggggctctgggaaatgtgtgaatgaagaaaggagccagggctatgcagctctgaggggtggagggaacccaggcctgcgtgtggtaggagaggaagctggatctgtgggcctgagaagcatcaagccagtggcctgggagagtagaggctccggtgttgaggaagaacattcctggattgttacgtaatctttcacatctgtgcaccttcgctgtctcaaggagagtaaacgccctaagggaggaactgcggattacactcctttggggctgattcttccaggccacttgtcagaggagcttgtgtggtttgaatggacagataaacactctcctttaggatgtcataggccactggggtcctgcaagcaggagtgaacaaggcccgctgtggtgtcgctaacggatcccaggcaggcactgggaggtgcgtgcgacctaaggcttgagaggaacagatgctgcttcactgagcaggtctggacagcacttctcaaagtgtggtctgaagacccttggggtccttgaggtcaagacattttttcaaaatataattaactcgttatttgctccttttaaaagagctctccttgtctcatgagtgtacacgacataattgttctgacttttccagaagttacttgacatctgatgacttcattgctccgatgcccaatgaaatgagtgcctgtgcatttaaacatttctcagccttaacccacatacacagaagtgctttggagacctcagtccattttgagagtgtaaaggggtgccaggaccaacaagtttgagaaccactgggctaagaccaaaatgacaacaacctgaaagacttttaagaaagatgtagaagcagacagtaattatccattctttttaatttttttttttttttttgcaggaaaaactgcatagaaaatctaatggatgaagatgagaaagacagagccaagaggtaagatgcagctgtccccctgctcagcagagctctctggcccccgggggtctgcctggcagaatctcgctggctttcactctgtgcaggtgaggccaccagcaagataggcagctgtaggacacactctctgtgacatattgcagtgctccatgagaaaccttctagagagctcactcagccctgcccctcactgtgaaatgacacattgtctaggactggctgagtggtctgggtttttgtcatgctcctgtgtacccctgttgacactggtcatctttcagggcttctggttactgcttttccaggacagacactgcttgacaagtcaggctgactggagcccagcaggcctggattcaagtcctaactcagttgctggggctctgtctggctttggataataataatgatcattgccacacagtgagcatgcagtcatcacccagcactgtgctaagcacttttgtatacatagattagctcagtttcctcggctgtagattggagatgtcatagacaccttgcgctgtggttgggtcaactaaaaatactaacttggcagctggcatgtgagagccctgataacctgtctatgttgattccttcattggacatgtattgaatgcctactagatatgcagtggaatcataacagtgacattgagagggtcaggaacagttgaatgtcatcagtttcacacgattcacccaagtcggcagttactgtgccatgctctggggaaaaaaacgtgagcaggaagctccttagtggctcactgcaggtcattcgggtggaggcccagccacgagccttggcagcaggggacatcctctctggagacactcttcattgcaaccccactggaccagcctccttgctgtgatctcacccctttctgcctctgccactgcttgtgtgtggcagggctctccgtcctctgtgacagcctcgtgagcctgcagagctaaagggtttgcccacttcccttcacagaacccactgcttgcttgtcacctgtaaatggtagtgccctcaggtaccacccagctctgtggctgcagggcagctgtcgttccatgtcacctggagaggcagccatgagaaccacaaatccctggccacccccagacctgccagacctgagtctgcaaggcataaggggagtctgggttgttttaaactcccccaatatttcctttaaaaaaatcagggagcagaggaaatggccagaagtgtagacagaacagccttcatcccaggatctgggagatcagcactggggactcttagtactctttacttttgcatatgtttgcaaatttctgcaataaaaattcaaacaggcatcagtgcatagaactccccagcttatcctgaagtgacaagccctttacttggcattgggacccaggtgctttgcaaactgtaggtcacaacctacaagggttgcaaaatccacttgggttccaagcaacaaatgaatagactagattagaccagactagagttccttcctctgggatgttttggtttcctccagcatagctatggatggagcgctggagacagatgtgagctgcattcctggcctgccctgtgctagctgatgaattccaactgacccctcatctctcaaagcctctgttttctcacctgcaatgtaagggtagtagtgtctgtcctgctttcctcactggttattttggaaattagctacaaaatacactgagtagtgctttttaaatattcatcattacatgtgtatgaatatgcagcacactttacagtaatacatttacagggcaatcttttttgtgtgtgatggagtctcaccctgttgcctaggctggagtgtagtggcgcgatcttggctcactgcaacctccctctcccgggttcaagcgcaggccattcttattagaaatgatggaaagaacagcagtggtagccagcattcgctgggtgcccacagtactgagctaagtccttttatgtacgtcatctcatattatcttctcaacattcctttgaagtgtgtatcattcttattcccattttacaggtgagaagactaaagttcaacaaggttgagtacattgtcagagatcagaaagctctaggaagtggcagaatgagaacttcaatacagacttctttaatcttagactctattcttatccccagaccacaagaggcttttcatataagaccaaactcaatctacctggccgactagacaaagagctgcattctggcatgactaaggagttcataggagttttacttttgctgttgtcatctttaatatcaccctccaaaccccttctagtcccatccctgcctctctcctgcaccgcttacctctaaatcaggaagagataaaaatgcatgtttaggctctaccatacgcagaaatcagcaaatatagacatgccaaaaaaaatctgggctaaaagttcctagaaataaatcagtttgtatgcagtttcttttcattcattcccctccccatttgctttgggccataagcatacctcccccacccaaaaacttctctacttggaaatctttgcacagagacctgtgtagtgaggctggggcccacactcctcccttgtactcagatggaaaaaggagtttagaacgtttggtggtacccagaaatagcaaggacgcagtacccctcctaacacttgggaacacacacacacacacacacacacacacacacacacacccctaagatcgtattcttttcaaagtagtttttatagcagtaacatgggaggcccttcccctaatcccacctggaggcctggcatgaattgtttttactcacccattatttttgatgagattagaaatgtttaacttgagatcaaaactctcattgcctccagaaaacatgctttgtgttaggcaaggctttcgatgctttagggaattcatggtgtatttgggttgtttgatcaagtattccaaacaagggcacggttccactttcttccgtgaatttccatgtaaatccagggagtattaattgagtgtctattgtgtgttcagaactgagtgctctattcttcagggaagacgcaaaaatatagtccttgtactcaagaaggaaacagcttgattgagagatatttgtaatccctagataatgaagttcacagctttttctgtattccagttataagcatgtctttctaattctgatgtgaaacagtgttgtagggtgtgtgtgtgtgcacgtgcatgcgcgtgcatttgtggtcatccaggaagcagtgtggggtagcaggaagtgcgcagggttagaatcagacaggcctggctttgattcttgccaatgtttactgtctgtccttgggcaagtcactaaatctctcttagcctcagtttcttcttctgtcaagtggggtgataatagtagctacttattgcagaaattaaatgtagctgcgtctgatcccctggcacagtgcagtatgcagtgctgatagggaaagctaaaatttgcagagcgctcacagcctgcctggagcattttacatgcagtaattctccaagccttacaacacctcctcacaaaataggttattcttagccccattttacagttgagaaacctgaggctcagggattgcacagccagttggcggcaggcagggattcaaatgcacacatctgtttctaaagtctgggctcctaacagcgtctgtgacattcagtaaatggaagccgctccttttgagtcaccaccttcccaaggggtagagaaaataagttctgataggaattcttgctttccaaagaaagcaattatctaactttgccgtattgcaaaatccagcttactccatttcttgacagaaatgagcacctgttggctaagaagaaactgcttcatattcacctcttcctttaatccagtgttaaatgagtccatgacctcctctctccagtcagctgtgaggttgtttccatagtcccatacctttggttgagagacggagagtagaaggggagtttatggctctgctgcctttgttcatgagaatcaaaagtgtcaggtcagattcgctgattcttggggctcttaatggagtggatgctggttctgaaacatcagctaaacaattttatgattctttgaccctaattcttagtctcaatgtcaataaagtggttcagatgagagggaagagttcaaacataagcaaacaagaagcctacgcatgccattttgcagaagcagatatttcagaaggaaaaggtttagccatttggttatttcttctggtccccccggggtggaggaaaaggatagggtagtttaatgacatggaccaatgaatggctgagaccatcccatctgtatttgttgactaagtgatgtggtgagcaagtggatgctacagatgaggatacatagcattatcctgccctcagagcgctttcaggcaagttagagatgcattcatgaaaataagcataaagaaggaaaagaaaacactttctgcagagtctgttttaggccaagacaggatggagatcgaaatttgtaaactcaaccctttcagccaattgctctttcagggagagtaatgtggcaaagaagagagactgttctcgtttcatttgtaccatttctttggatataaattctgtaggtctgaaagcaaaggtctgcccagaaaggctgtagcccttttggaggactccagccccatgcacacttgcagagtgcccctgcatgcaggcacagtgcagtgagaaccccgggccctcagcattggacagtgggctgatgctcccagctggagcctgtcgtgctaattttgctgtgatttcctttcataggctttggattgggttttacttacatcatcataagctcccacacggggggaaaaaatggcagtaaaacatctctgaggcttcctctttgttttttttttttttatggttaaggcagcagcaggcattgcgagaacgcaggaggtaataggacatgcgattcgtgtatattaccttgtaatttccagatgagtgattctgttctcaaaacaaaggggaaagtagaactgtacttgcaggcagaatgctaattcttcctgtagcccagtaaacgatggaatggaaaaggggcctccctctgctgaggggcttttggcttttaccctgctagcgttctttgattggctcagaggagttgtcagagaagcgtggtgtctggcaggcttagaaacttgggaatgtcttcgttcaaggagatccagaacctctctgggggcatctgaggcaaaaggcagtttactaaagccttttcaataatttcagtaaattttaaattgaaaagagatgatcaggaatgcaccacttgaaaatgctgcctttctttagaaaaggctaaacgtttctttttagaattttggtgacaagttcctaactatcatgttccaattaaatggtgcctgtgttactgttaactaagagtcactatgaaattaggccagcttcccatttgggcccagacactttctgctaactgtggttaagagtaaagctgttctgttgcttctcgggagaatagacagcctcagctgctctcagtcacccccagacgctttgctaagtctctgcaatagttccctaagttctccatgaggtgaggatggtatcagcccttcctgctggggcaacttttctccccacacagccagatgacatcttctttttttttttttttttaagacagagactctgtctcactctgctacccaggctggagtgcaatggcgtgatctcagctcactgcaacctctgcctcctgggttcaagtgattctcctcccacagcctcccaagtagctgggattacaggcgtccaccaccatgtctggctaattttgtatttttagtagagttggggtttcaccatgttggccaggctggtcttgaactcctgacctcaagtgatccacctgtctcagcctcccataatgttgggattacaggcatgagccaccatgcccagcctgatgtcttcttcttacaccaaacttcttgagactctgagcccagtgatgcccccaaaccgcatggcctcagcatgcagggatgctgcctgggctatggaagtgaggggttgtgcacctgtctccagactctaagcctgggcacaggaggggactgcactgaccttatatggaccttgatttatgccgaagttacccaaaatgtattatggagaatattaatcccaggaaatgcccccaaaataattgcggactgtatgtttactgtttctcccttgtggagaattttagggcttctcagcacattaaagatgctaagactgcaattagcaaataaccaaaaatcatacaatcctgcatttaaaaaattatcctgaaaaataaaaacatagtggcaagaaaataacctcctctggccatggtccttcccctttcttcaagtaattcttcatgattttccacagaagacccattgaccaacactatcttaggcaatagatatgtcatctgtattcccattataattatacattttcttatatataaaaaattccaaaacaacatttgaaaaattctgaaatgtttgaagatgtgagcaaagattatttatttattgagacggagttttgctcttattgcccagactagagtgcagtggcgcaatcatggctcactgcaacctccgcttcccaggttcaagcaattctcctgcccggccacaaagatcatttagaatcataccacctggagatagccactgttaatattatagcatattctctgtcagcctttcttatacatttccattcaattttttttttttgagacagagtctagctctgttgcccaggctggagtgcagtggcacaatgtcggctcactgcaacctccacctcccgggttcaagccatcctcctgtctcagccttctgagtagctgggattacatgcatgtaccaccacgccaggctaatttttgtatttttagtggagatggggtttcaccgtgttagccaggctggtctcaaactcctggcctcaagtgatccaccagccttggcctcccaaagtgctgggattacaggtgtgagcaatggcgcccggcttccagtcagttttaataggaatgctcatagatgctctttgttaatgtggatgaccagctctaatgtattctttaggaaagttcaccttttatggacagcactgtcttcactgagcatcgtgtgctgcagttgcctcttaaaactgtgagcacctatttggtatatttcagttctaccagaaatgtgtgttccttctacaacctcagtcgtaggcactgtggagactacaaaggaagaataaggcctagtcctgatatgccttctagaaaggttcagtttgctccatttatttatttatttatttatttatttatttatttattattattattttgctcagtttataaaactcagatttgagaagcctagtgctgcacccttttcagttcctgtcccatcctataatgcagaactagtgaccccaggtaagatatgccagaattccccgtctggaaggaacttgggtatcagtgtgtctttggtttaggcattaactattctgggtttctgttgctatgtaacaaaccaccccaaaatgtgagggattaaagcaatggcattcattttgctcatggatctttgactagggtagggcttggcagggagtgcctgtttcgttccaggtggtatcagccagagtagctcaaagatggtgggtagaaccccctgaagacacgctcactcccacacctttggttgatgttggctttcaaccagcatgtccactggaagtagctttccctatggagatatggcttcctcacaacacgtggttgcattcaagggcgaatgtcacggggaagctctatctcctcttagtacctggctttggaagccaaacattgtcactgctgctgctatctattcatcaggagccagcctccaagtccagcctttattcaagggaaggagaattagaacccatcttttgatgggagagcttcagagaatttaaatgctgtgtgtcagaatcaccatatcaatgtcctcactgttttttaagaggaaactgaggaacgtgtggttgggagtgccttgcttactctctcctggcttaggtgccgaacgaggatgagaactcacatcttctgaagtctgtctagtgctcatctcagccaagccaaattgtctggattctcttcttccctccacctctcttcagctcccggtgggaattgggaacatgaaaataggatgcctcatagaatgcctttagctcctcaccatagagaccctccaagggcaagaagtcactcttcagagagctgcacatctatctgcatacctatttgtacctcttgttcaaataccagctcttcttggcagcaagggagcctgctagtgctcccttcaccagttccgaacatagctttccaacttgattggaaagcatttaatttatgagctttcactccatttggtcaactgtctttgattcagagagcatcttctatattcccccatcaggatgccctatttactcagttaacagaactagacttagtggagccagtttaaaagatggcacccttgggaagaggcaccaggaaaagcatcttagtagcagggaagcctgatagacgttatggatagtttcccaatggataccagagatgcataagctgaagacattgccagccagagcagtccacatatgaaatggattaaaaggaagagcttcctaggaatgatagtttttcccccctcttttctctttttactgccttttatcctcattcctgatccagctcacagatgaggagttccgattcaatggtttttaattttttcccaagggaaacataggacttttggtgatgtataaaatgtacctgcaccactatgcatgcgttcttgtgaatttaaggaagacagagggccaaggacacaaacttgggggtgctcgatgtcattcacctgcatgctcaaagtattcttggcacagggtctctcccagcaggatgggaaatgagcatcttccttcctcctctgtgccacaggcctctcagaaggacctgatccccatcccagctacagccatgcatcttgggcagctgggtgtgaagtccagtcttgcacactaagtgtgcacacctgtatcatctcttcaccaagaaggaggggagagaagcattgagtatggtgtaaataatatgcatttgtcttatgaaatcctctcagagaagcgcctccaagattccacctgtgggagaaacccaaggggtatgggtgtgggtgtgtgtgtgacactttgccttggaaccatggccctctcctgccttgcattatgtggtgactctccttccttcagccttcctgaaataccacagacacagcccctttgtaagagtatggggctactgtgctaggactcgcttggatcctgagctgcaagtacaaccctcctctggattccagagttctagagagctacgcctgaggtgcacatctactctcagagggtagggaagcataggacagtagttttattgggttagtaaaactccatgttgatgtgcaatggcggattccttttgatgcttttttaatgttagctcattccagagtgatacactaataccaagggaagaagggcctgcccagttcgtctgtcattctctttgttctgcaagagctacccagaaatatgtttcttcaagagtctcttataattacagtccagctcaccccatacgcttttctgcaaaaggatcttattaacagcccctgccaccaggcttttatattctctgttcccaccctttgatttctatgggttttttacaaactcattaaaaaatatatgaaaagatatatgagagttttggatcttggtaagatggagttagcctactccgtcctgtccatcacactgaatgcagctgtaaagcgtgagcagaatgcatgaaacagccatttgaggaccctgaagagtaaatagtagggtgcagattggggaagcactaccaaaccagcagcgagttcaccattttttcccctgtaatatctcctagcctagactcaatgcagccccacacccagaagtgggcctctgctgacagagagaggaccaggagctctagtactggcttaaggagcaggaacaaggtctcctaatgctcagattgtgcaaggttaaatctgcccttttttgttttttatttatttccttgcatcccagaagcaatcctccaacagcagcatagcaggagcaacagtggccatcagaatccacatgaaaccttttatgcagaggaaggggaacctctctccagacagagcagctacacttccaagagggtgggatgaaaccctgctgctttcttcccccttgctctctatcttcctactgcttggccccagatgaaagcgcagatgtaggtagtatgaggaagggcaggataaatagagccagctttctggccaacggaacagaaagggagcctgggaaccagaaggtactgggcagatttcagagagggaggtgctcaggaaagtgactctataaagctggttgtgagtttctgagctcacccctgagctgaatctgcatggatctgatcttgagcagcataccatagaccctcaggtctgaacttcagaatagaccaccacccaaggtctatgactggccatgtggaacatattttagtagcactatggatttctcatcagaaaacagggaagccttctgataggggtaaaatattttttaaatgttaaaagaaaagagctattaacccagaattcaacatgcagtgaaaatatccttcaggaatgaaggtaaaatgaagattactctcaaatgaacgaaaacttcctgtcaagagacctgctctgagagaattactaaaggaagtttttcagcagaaaggaaatgacactagatagaaacttggaataggaagaataaaggaagaaaacagaaatggtaaatatttgacaaaaacagcataatctgatagggtatatttagtgtatgtatagatagtacataagacaattgcagcataaaagaggggagaaggtagagggggctatatagagaaaagtttctagattccatttgaaatgataaaatattctaagtggactttgaaaagacaagtttgtatattacagtccctagaattattactaaaagtcatacaaagaaatatggaggggaaaacaatagataaattaaaatggaatactaaaaaatgtttaaataatccaaaagaaagcaggaaaggggaaataaacaataacccaaaacaaagaatgtacaaacagaaagcatgttaaaatagaaaatgtaaatccaaacatatgtgattacattaaatgtaaattgtctaaatatgccaactaaaaaacagattttgttccaatgatttttttcagtaacctaaatacctaaatatatgctgtctacaagacattcaactcaaatatgatgctataggtagagggtaaaagtaaaactatggaaaatgatataccaaacaaacactaattaaagaaagccaaaatggttctattaatatcaaatgaaatagatttcagagcaaagaaatttactaggaataaagagtgacattacgtatgatacaggatcaattcaccaagaacagataatagctctaatatgtatacacctaaaaacaaagcttcaaagtacaggaagcacaacctgaagaagttagatgagtctttaacatgctcctcttagtaatagaactagtagagtaaacttcagcaaggatatagaagaactgaaaaatgccatcaaccaacagaatctgattggtatttatacaacattccactcagcaataacagaatacacatattttcaagtacatattgaacatttaccaagctagaccaaaccctgcttcataaaacaaatgtaaataaattcaaatgaaaaaattagaaacagaaagatagcgggaaaaatatctccacatcttggaaattaaacaacaaactgtgtagtaatccatgggtcaaagagaaagtctcaaggatattagaaaatattttagctaaataaaaatgaacatacatttcaaaattagtgggttgccgctacagcaatgcttagagggaaacttgcaacattaaatgctcttattagaaaaaaaggaaagatctcaaatcaacaactaatctctaccttaagaaactagaaacagaaaagcaaaataaactcacagcaagaaagatggaaattagatataaacacagaaagtaataaaattagaaacagaaaaacaatatagaaaaatcaactaaactaaaaggtgattttttaaaagattggcaaggcatggtggctcatgcctgtaatcccagcaggttgagaggccaaggtaaggggatcatttgaggtcaggagttcaagaccagcctgatcaacatagtgaaacccccgtctctactaaaaatacaaaaattagccaggcgtggtggcgggcacctgtaattccagctacttgggaggctgaagcaggagaatcacttgaacctgggaggtggaggttgcagtgagccgagatcgtgccattgcacttcagcctgggtgacaagagcgaaactccatctaaaaaaataataaaaataataaaagatcaataaaattgataagtctatcaagggactgaaaaagacacgatttatcaatagcaggaataagaaggcctatcattagatattcctgagaaattcaaagggccataaggaaatactatgaacaattagagccgcataaaatccaaccacttagatgaaatgggccaattacttaaaaaccacgactaccaaactcacaaaagatgaacgagaaaacctagagtcctataactaagaaattgaatttgtatttgaaaacctgaacaggaaatctccagacccagatgatttcactggtgaattctgccagacattaaaagaagaaatatcaccaattctgttcacactcttccagaaagttgaagataaggaaatactttggagtttattttatgagaccagcattacccaaagacagtatgagaaaggaaatctacagaacagcatttttcataagtgtagatacaaaatttctcaacaaaacattagcaaattatatccaactatatatatttatatatatatattttaaattacaatcaagtggagcttatctagggaatgcaaggctattcagaattcaaaaatcaatgtaatccgttatgttatgaagttacaaaagaaaaaccacatgattatatcaattgatgcagaaaaagactttggcaaaatgcaacatctattcatgaaataaaaatcaatactgagattataaatctaaatgtaaaatacgtaaaactgtaaaaccataagaagaaaaaatagaaagtctttgtagtctataaggttaggcaaagagttcctagacctaacaccaaaagtacaactcgtaagagaaaaaattgttaaacctggacctcatcaaaattaaaaactcactctgtaagttactattaagagattgaaaaggcaagctatagtcgggtagaaaatactgacaaatcacatttctgacaaaagacttgtatccagaaaatacaagcaactgtcaaaactcaatagtaaggaaatagacaacccaattttaaaatgggcaaaagatatgaacagatgcttcctcaaagagggtctacagatgtcaaaaaaagtgaaaagatgtccactgccattagccattagatacatgcaaattaaacctctaataatgtaccaccgcaactttcttagattagctaaaatttaaagtactgacaatattaattccctttaaggttgtagaacgctggatcactcatacattgctggtagggaggtaaaatggcatggccactctggaaaacggtttggtagtttcttataaacatatagtttccatatgacccagacgttctagtcctggattctttacttcagaaaaatacaaacacgttcactgaaaaacctgtacaccaatgggcatagtagctgtattcataattacccaaactggaaacaacccacatttcctcaatgggtgaatgcataaaccggctgtggaacacccgtacagtagaaaactactcaccaatgagaaggcacacggtattgacagacacaagttgaataaatctcaaaggcattatgctgggtagaagcagccaggctcaaaaggttacatgctataggattatacttttacgacattcttgaaaagagcatagggatggagaacagaaccgagctggccagagttttgtgggagtggagggcatgagagttttgtagagagctctctctcgtcttgatggtgatgacggttgcatatctttatacatgtgctaaaacgtatagaaccgtgtccccgaagaaaaagtcaggctcactgtgtgttaattttaaggggaaaaaaaacaaaaacaaaaacaaaaaaacgttttaaagcacccaccgtcagcgtcactttttcgaggctaatgaagtttgactgagccttgcttggctctttccctacatcccccgctgggggcggtagggagcagcagcgccgtgctgtgctttggggtggaggagcctcacggacccttcctgtctctactcacttcccctttaagttgggtccctcatcctttcctgaggacccatttcatttcctttccctgtccccactcatccaaaagctcagaccaggttgcttggcctaccattcacgactgcgccgtcggtctccccgtgcctccccaccctatcctttccttctccagttgagcccaactctgctgccaaacttgaccacccagctttcccctgggctgtcctctccacccctgactatgcacccctcaaagccacctcatgttcttgcctctaggggctccgtggctgggctccctccttggtgagcacccttggcgattcgttggaacttctcaccgggcagtattgtattgcaccccctataccagcttctgaggaatgagttccatctcttcctctagacactgagctgcttttagttgagggccaagacctcttcattgccgcctcctccatatcgcttgatggagcgccttgtgcacagaaggtgctaatcagagaatatagaacaaatactcttcctgtctctaattgcccttgtccagagaaccctcaagtcagaagtggaagagggtcctcctgtcaaagggggagggagtggggagatgttagtcaaagggtagaaagcttcagttagacaggaggaatcaggttttgagatctatcacacagcagggtgactgtagttaataataacgtacagtgttgtatatttcaaaattgcaaggagagtaaatgtcaaatgtctcaccacaaataagtgaagtgactgatatggtaattagcttaatttaatcattccatgttgtatatatatatatcaaaacatcacattgtaccccataaacatgtacagtttttaagggtactggaaggtaacctgtgccccacttccctggaggtctgtctgtattgcatttaataactggatgtttgagttccacccatgagtgcctttctgctcaatcccctactatgtgtatccagatagactagttgggctatgtggcccacaatccccatatctcagtaaagctgacgtgctcatcacagagctgctggccccttactataaagtgtcctcacccaaggacccaggctgacagaggcttcacctcccattgccaagggaggtgaatggaaaaaggaatgaaacagattttgcactgactcttcatgcttctccctgggaactgacacatggcacttgtgcgtacgtgttcttggccaagcgaaggggcagggaagcacaatcctgctctctccagaagacaaactggaaatatttggtgaacagcaatcctaacaccacaggtgaccacgacagtgggaaaggccactcctcctaggagctgaagcgaaggtcgcagtcttcccttgatttcccgcagtacccttccccaacggggaacgcaaacaccagcctcctgttagtgtgtggcactgtttctctgcacggtgtgcttagtttttgtgctataaactcaagcagccagaattagtcactctcagttctgtgttcccagaacactgggtccgtaggtccataacagatcccgccacagtgatttggagggagctgtaggaagtggcaggagggtgcacggcctcacagcgtgggcactggagccagcctgtggcaccacttcccagacctgtgatggtggtgagttacacagcctctcagtgcctcgctccttccccttggaatggaaatgcaatagtacctgccttaaagggttgccatgagaattgaaggaatgaatggatgtaaagctcttaacatggtgcccgttacatacatagtaagtgcccagcaaatattccttgtgtaaccagacccaaactccccaagatgcccgatgatggacgcttcagaaccagataacttggggtttttgagccccacattcaaaaatcaatatccatgtatatttaaaacacacacataccttcccttcctccctcccttggtctctctcttactctctctttcttaaactcaataagatgatgacaaacagcccaactggaaaataggcagaagatttgaacaaacgcctcacaaaataagatacataaatggccattaagcatgtaaaaagatgttcgacattactagtcactaggaaaatgcaaatccaagccgcagtaaggtaacatttcaacggctaaacatttcaatgcactgtatgtcagtgcagccgtgtcttatcaggttaaacatacgcttagcagatgacccagcaattccatgcctctgtattcacccaagagaaatgaatgcctatatctacacacagatctgtacatgagtgttcagaacggcattattcttattacccctgaactggaaatgaaccagatgttgtggcatattcatacacaggaatgctagtcatcaggaaaaaggaatggggtgttaatatgtgcagcaacatgatgcaactcaaaaatgtcatgctaaatcaaaaagactgtatactctgattccaggtctgttaaattctagaccaggtgaaactacactaccagcagatcagtggttggttgcctgtggctatggctgggggtgggcggatcaatcacaaagacacaggagaaacctctttaggatgaaggaactgttgtttatcttgattttggtggtagttacccaactaatacaccaaactatgcactaaaatggatgaattttattgaatttaaaaaatgccttataactccaaagcctggccaggcatggtggctcatgcctgtaatcccagcacatttgtggaggccgaggctggtggatcacctgaggtcaggagttcgagaccagcctggtcaacatggtgaaaccctgtctctcctaaaaaatacaaaaattagccgggtgtggtggtgcatgcctgtaatcccagcttctcgggacgctgaggcaggagaatcccttgaacccgggaggtggaggttgtagtgagctgagatcgcgtcactgcactccagcctgggcaacaagagtgagactctgtctcaaaaacaaaaacccaaagcctggttgttggggttgttggagtgtctttcaaaaccttcgtcccagtgtctgtgtgtggtggtctcggggcctgccgagaggaccttctttttggaaataaggtcattccaggctcattttctttctcttgcctgatagcagtggaaccagctgacagcgaccagtttccagtggacaccacagtgtgtcccagccggaggcggatggaaacaagcttgtgtctctgtcactaacgataggagccttcgtcggagttgctaccaggccatgttggtcgtcattacacccattgaagacgagaacagagcagtaatgagctgggtgttatcagctcacaaataatttataatgggcaaactaggacaggaacagagctttttttggctaaggaggttgcatgtcactctttaaaatctaggccaaaaaattatttataatgcatagacattcactctgaaagttaaaggattcctttcttctctcccatgtgtttgaacatggtcttttagcctggactagcaacaagactccgcaacatcttgctgccacgcctgcagttagtgtgtgatgtgagagagtgcaggtaaagagagtggctcggcgagggacagggcctttgtagaaggccaagaacagacagggaggaggggagaggcaggaaaagacccctaggtaaagggtagtgaccacacacgttagctgagctttgaagaattgcccaaatgttatcaggaaacagcctaaactgagataggaccggtaaaagatgggttgtgaacatgtgtgttgaaataaaggcaggttgtgtgcaattaggcaggggcaaactgagtggttatggtcctcgtgatgtctagggaaagggttttggaaatacgtccttttgtgtccaagggctgtttattgatactgttacctatagatacttacacctgctccaagggaggtgaatcagaatccagcagcacactctgtcctgaccacacattggccaggagcctcctggtgaaggatttgctcccctgagaaccatgaccccgggcccaaggtgcctggaaaagcagcaatgttttatgggcctggcctctggggcccctgttctctctcagagagttgacttctggaacaagtctgtcttcagtgaactggggaggagtgagccagctttctcagccctggatcaccttcaaatacgtggattgttgatgaagggcctgtggcgtgtcattgaagatggaggcccctcgagtagcactgcttccggacttttcaggagggctttttgcatcacgtgttccttgttcgttgttaattagagcattcctgagagccacgattccctactcaagttcctgaggatctcagggtcctcagaggtgcttgggtggcttgggggaggcccctcctctctaaccaagcagcttccctttgatctctcctataagtgtgcagcacagggtgtcacttatttaaaatagactttattttttggagcatttttaggctcacagacaaactgagtgaaagacacagagcgttcccatatccccctgagccctccctagacacactcagcctcccccattatcagcatcccccaccagagtggtgcattagttatagctgataagcttacactgatacattgttaccattcagagttaacatcaaggcacactcttgtgttgtacattctccaagtctagacaaatgtgttgacacacatccaccagtatggtgtcatacagagtggattcactgccctaaaaatcctctgttcatccctcctaacccctagcaaccactgatctttgtgctgtctctgtagttttgcattttccagaatgtcatatacttgctatcatacagtgtgtagctttttcagactggcttctccaacttagtaatatgtgtttaactttcctccatgtcattttaaaaagtgttcgtctgctcttagcagcttgacagccatggtgcagtacctgtcatacctctgccctgggtctgtacagccctggctgttgtaggcagggtgtgtcttgcctcccccaacagggcgatgagctctttggagcaggggccaggacatatgcactggtggcacacgggatacctggccaccccgtgggccctggaaccaggctgggtgttctggattgaaggggacttggtttgagtcttaggaagggctctccgagcacagccatctcagtcagcagtgtgtcctttgctctctgaaagtgaaagctctatgagatccgaatgagcagcatccggcctcagagctaatctgtcagattttgcgtctgagtcagaacttactggttattaatgctgtctgtctttgtggccaagagtctagcaaaacattttctatcctcctgccttggaaatgtggccagcgtgaccttcctgaaagagttttttgataagatagatgatcacaatagaatgtgctctaatagaaagtgcttttgtttcatcacaaagcctttgtgacgtggaatgttccagtaacctgctcgttttgtgtttacagagcttctcgaaacaagtctgagaagaagcgtcgggaccagttcaatgttctcatcaaagagctcagttccatgctccctggcaacacgcggaaaatggacaaaaccaccgtgttggaaaaggtcatcggatttttgcagaaacacaatggtaaaggtcacccttctctctgttttttttccaccctgccctgtccatgtggtgatgacttcaccaatctgggctgcctggttggttttgtctccccagccaggcccagccttaccggtcgagggcttcccattgtaaagacactccaccctctatcagcccgtctctggctgggtggggagagggcacacacctcccaattgcattataagccagacgagagaatccaaaacaacctcacaggtagcacccagccgaagcagcgtggcattcacagtgacaacatcttgatcaaaaatccctggaacaagtgtcttttattcaatgctgaacagatgcagtggctgaatactcacttcctgtgggatcagactatgtgggccttttcatccctctctgccactgccctcgaactctttggtcttttgcgctacatcatgaaaaaatacattgaaaagaatttattttcttaatgtcacattcattctgtttttattgagatataatgtttataccataaaattcaccattttaaagtgtagagtgcagtggtcttcagtatattcacaaggtggtgtaaccatcaccactctctaatttcatcatgccaaaaaagaaaccctgtatccattagccatcatttcccattcttccccctccctccagatcctggcaaccacgaatctgttttctgtctccatcaattcccctattctaggcattttatacaagtagaatcatacggtatgtggtctttttgtatctggcttctttcacgtagcatctgtgttttagcatgtgtgagtacttcattccgtttcatggaccaacaatattccattgtatggatatattaatatcatattttgattaaccattcatcagttgatggatatttgggttgtttacaatttttggaaattatgaatgatgctgctgtgaacattcatgtacaaatttttgagttgatatatgttttcacttcttttgtttgtattcctaggaggggaattgctgcattaaatggtagtgtttagctttctgaggaactgccaaactgttttccaaggtggcttgtacctatttatattcccagcagcaatgtatgagggttccaatttctccacatccttgtcaacacttattactgtcttcttttattatgactattattaatataatctccctagtgggtatgaagtgatatcttatgtgactttgatttgaatttcccaataactgatcatgttttccttttcgtgatcttttcatgtacttattggctatttgtgtatcttctttggagagatgtccaaatccatggcccctttttaaatcattgatttttctttttatgctggagtggtaagagttctccatgtattctagatactagacccttatctggtatagaattcgaaaatatcttcccccattctgtggattgtctttttacttttcaagtgatactctttgacacacgaaggttttaaattttaatcagttaatgtcaaatttatttttttcttttgactacttgtgcttgaggcattctatctaagaaatcattgcctaatctaaggtaatgaagatttatatctatgttttcttctaaaaggtttataaccttttttctttttttctttctttttttttttttttttgagacagtcttgttctgtcaccaagactggagtgcagcggcgtgatctaggctcactgcaagctccgcctccagggttcacaccattctcctgcctcagcctcctgagtagctgggactagaggtgccaccacacccggctaattttttctatttttagtagagaaggggtttcaccatgttagccaggatagtctcaatctcctgacctcgtgattcacccgccccggcctcccaaagtgctgggattgcaggtgtgagccaccacgcccagcctaaaaggtttataattttaaactgtaggttaagcatagatatttgatccattttgtgttcgtttttgtagatgtcgtaaggtgggctatgaaaattcatccttttgcatgtggatttccagttatcctggcactccattctttttctaactttgtaatactttataaaagtaacacatacagagaatatacaaatcataactgtacagttgaattaattatcacaaagcagacacagccagggaaccaacgacccaggtcaagaaatagaagctccttcctgtcttcctctgctttcccaaaagaaggaacctctgtgctgacttctaaccccataggttgcttttgcctgttggaaccttattcagatggaaccatgaattatacacatgatgtttatgagattcctcccattcttcccatgctattgctagttccctttcattagtgtatagtattccatcacacgatcacctgcatatgccacttgaactcatccttgagctcacatctttctcaaatcattctctctcccttttcctctccttcaaacacttttacctgttagtgtgtggtcacacctaccctgccagtcacccaggatgttacaaaaagtcacagaatagttaagagggctcagaacctattagcaagcaggaagagcagaattcttttttctttaatcatgacaccaaacataataagtcagaaatgtcagaattagtgaggaaataattacagttcttccatgcaggcagtgatgtgtctcttccactgaacattttcctagacaagatgatttcataaaagagggtgcggctgggacatcagaaagtttcattatacttcttagtcttttattatttctttgatgatcatatatacctattaaaaatgtgacagtgatgatatatcctcatattattttttccaaagctgcccaggagagagtaaagaacatgttaattgcttttgttaaaagtcaggaaagaccaatcaagcaggattggaacgaagtgttacagcagtatttgattgccctgataatttaatcaaatggttatatttcctaaataatgatttagccaagtgaaatagcaggttggtttgattgccaagatattttgtgcaaattactcaaactaggtcattgccaccgagaagcaggacagctgttaaataggacagctgggatcaagttcatcagcctgacatttatgccgggctctgtccactgtggaattacagaattgtcaaatctgggccctggaaaggataagtcagcagaaatgcagcctccaaataccgggagagcctgcttcagctcgcctttttcataagatgaaggcctactccgcacaacctgcttaaacacaatgaggatcatgccaggatctcactcatctctgtgatttcatattcaaaataaagcagaaaattcatggtacgttttttggggaagtagagttgttggagcaaaacttggattaaagcaaaaaacaaagcaatcactttcctttacttgcagtccaaatggacatgaactctgcaggcacctgcaacagagtagagaatactgaccgtaagcatctgttcagggcttgctatgagctgggcaatattctaagagctctacctacaggaactcctctacatagagctcctcttcatggcagcactttcttttgggagacagagtcttggtctgtcacccaggctagagtgcagtggtgcaatttcagcttactgcagcctccacctcccaggttcaagcgattctcctgccttagcttcccaagtagctgggattgcagacacgtgccaccacacctggctaattttttgtatttttagtgaagatggggttttgccactttggctagcctggtctcgaactcctggcctcaagtgatctgcccaccttggcctcccaaagtgctgggatcacagacgtgagccactgcacccggcccatggcagcactttgagttagttccattgcacagatgagacacacaaggtcaagtcactcatccaagtcagacagccaggaaaatgtggaatctaagcccagcagcctgtctccagagcccaaccttttagcactacactcaatggctgctccacaaggggtgatctacagggcttcttgtggctatttatatcacagctgcactccagctgttcatgagtgtgtccatttagactgctggttctcaaccttgtgtgcacatttgaatcacctgaagagcttttgaaaaatacatattaccaggtaaccccccacagaccaatatgtcatgatctctaggggtgggaccacaatgggataccagcttgcaagagaagattgttcacttttcaggagttttgcaagccagttgacatcaagttggtagcttgaaatcagccatggtaggcgtatttacaccacagaaaggggcaaacactgcaaatcagggctgtttgttgtagagggtggagagcctttcaccagcagatggctaggtaaggcccaggcatcagcatttttaaggcccccaggtgattccggtgtgcagtgagggttaagaactatgaatttcaacatgcttcctgccgtcatgctaaagggagatcacatgataagtaaggaaagatgattaggtccaagtagttattatttagctctttccccaataatctttcagcattgctattttctcagcttcggaaatgaattttaatcctgaactgtacacttattctctctgaagtaatccaaatcaaaatgagaatctgatcatgattctttgtagcaaaattttgtaacagtagctattataagagagaaatccctaaagtctgtaaatagcaggacatattggacatccttatctacatccatctagatgttctagtgggtcaggctggcctacacattatcctcttcctgagtgagtctaaatgaaattttctcctaactttaaatcccattcctcattcacacttctttaatgtgtctgtcttcatggatggaaggtgaggtggggagagctgtagaacaaggagaaatttccctattgaacagggtaatatttacccaggacagctgtggaatttctgctccattttccaggcttttatttgaccacatacatcccaaacatatactgcttattattcagatataccaggagcagtcgggagttgagcactctaggaaatgggtacaagtgatatcagagtagaatttggggggttggctcttaatcacaatgttttcctacaaaaatggctctcaggtggttttgtttcccttgaaatttggaaaccacttttaccataacactgaattttacttcccagtgtaacattttttcctcgattcgagacatcgtatctaacatattttttttaatatgctatgaaatgaaccttaacttccaaggagtctaattcagttgttgaaatacaaagtgaatgagatggctgctttcagtgttattatgctagcgttaacaaaatacccagtcatacagaatgatctaaaaattacttaagttaaagaaatgggtatttcattttccttcaccattaagttgaatggatctctatttaaatgaaatttgggctgccataaagactcttctgctagaaaaacagttagtctatagtttgatcctagtggtcaaaagagtctcacagatgagtgtgcatattggggagaagaggaaaggcatttatggggttaaatattatagcacatcttcagtccctctcttttctaagtggtcgaactgtggcaaccatctgtttgaagaactgggagttgcaccctctcttccttgcctcagccagcaccacagaatggattctggcccacgatgtgcatgtagcacctgcctctgcttcccatgctgcattccaccatgtgcatatgaggcccgacactggtcgtttccccacagcgcggccctccctccaggggccctctcagtgtcgttggctgcctgaccatcagcacggtttcctctcctgggtttcttctcctgggtttcttccagtgttctattaccaaagactcatagcagctcttttctgcccctttaaactcacaaagacaaaaatccaattttgtataacagcagcagcaactcgttctttctgacatctcgaaggaaggagtcttcctggtggagacgagcactgctgggaacattgggttttggaacaagtggaggttcacagggtgatgcgcataactcagctctttttttttttttttttttttgacatggagtcttgctctgtcacccaggctggagtgtggtggtgcgatcttggctcactgcaagctctgcctcctggatttatgccattctcctgcctcagcctcctgaggagctgggactacaggagcccaccaccactcccggctaatattttgtatttttagtagagacggggtttcaccattagccaggatggtctcgatctcctgacctcgtgatctgcccatctcggcctcccaaagtgctgggattacaggcgtgagccaccgcgcccggccataactcagctctttacatcttttgttcatgagtagctgctgcattcactaagattcattcattcaaatggcagaatgcattcctcatgcgccacgtaagagagattatcaaaaacacaggcacaaaggagagagccttgaaatctttctcctggcttaaagttgatggattatctgcctggaccatatgcattctccaggaagttgttaaacaggttagttttattctctgagctatgagtcttatgttcttacatttttcctagcaccaaggaaataatctctgaagaaacctcttactacatgaaatggagcaaaatgttggcttaagatggaggataaactgaaggaaaaacaaacatatttgatattacatttgagccacctataattatcttatcagaaataattcaataatagaacaaaacattctttaaaaatgcagaagaactaaaatatttaaggagccccttgtaggccaatgactatttgaatttacaaatcggcataatgtcttcagtacaaggcagttctgtgaaatggataaactatagattaaccccaaaaagttttgagaagagtacattatgtgtatgtgtatagcacgctgtatttcagtaatggaaatgctgaaaaatatggtacattctgtataacacagtgggttattttccacacgcctaaggtgtttctggaatttttaaaatcccaggtctgtgaagtgttttgcttcacctgggccatgaagaagccacttatgaaggtgtcacaccatcccagtgtttgttcctattgccttcataggtggtaactacctaattccaactgttgacgatggagttcgtcatgtagacattcagggccatggtaccacctgcaagggcaggcaccacagccatagagaaggtgggggatgcacctccctaaagcctcattaagggagatgagaacatccgaagctcccagtccttggaaatcagggtaacatatttccttctgctggcttcttaaattaaactacacagaagtttacacaaaattacatagaagtaacatgtgcttcatttgttaattccaatttctaggtgccattgaatataaaggcttatttgtgtctcttttctagaagtctcagcgcaaacggaaatctgtgacattcagcaagactggaagccttcattcctcagtaatgaagaattcacccagctgatgttggaggtgaaatgcactttcaaaatagcttaaacagttgccagttaaaatgtagctacttgttgcagataagtccctgtacccaaaggaaactactgttcttgatcctgggaagacttgactttgaaacagatacctccctgaggctctctgcctgctgttgcctatgggccatgtcaagaagaatcccaaaattgaatgtggtcacgtgttttcactacagtgaccacaggatgagccccttgatggtgtcacaaccagaggacaccttgctggggagccaggaagggtgggttcgaggtaggtagagagaggagaaggacagagggaagatgaatcagcttgcactgtcatttgactcagagagtcttctcttagactgctatgattatacattttttcccttagtagaaacacgttttgaaattaaaaattgtctttttaagatatgctttgaacttgaactcatgttacatccacatggcatacagatatcagccacagggatcccgtgcctccccatccagctcatgtcctttctgtgctgagtgagatgctcatgttcctccctctgggtcagaggccccatactcatctacagggccgtatttgtgaaaacctggctgatctaaatgagtccctttcctcaacatcatgtatttgtatatgggtgaaactcctcaatgcagataagcataagcctctacagaaacaactgccaacatgctgtggcttctcacctggagataagttttggagtatatggatatggcagtgggtcagagaaagctccaggcatgacatatccacgcccgcaaccaagaggaggcaaactgggacagatgagctcagcaaaaggaagttagacgctggctgtgaccagtggttcctggcagggtgtttggagagtggtttctggggataaatctttctatctcatatcttatgtgcctatataagactgatgtaaacttcaatttacatagattaacttgcagaaaacagaaagtactggagtaagaaaatgccagaatgaagatgtccaaatattatgaaatgtaaacgcattaatgaacatttgcataagatgaaagatacttaaatctacatgtgaactatatttaaagaaaatacagaactttctgcagaagcaatgcatttttaagtatgttaaatttaaagcagcttgtgaaatgttgaattaatgtatcattatgctaatttacataaatcgatttatcttttaattcttatggaaaagtagttaaaacacataaccctatagcagcagcctttttttaagagcctgtagcacaaccttttttttttttcccagtgagtttcaaactatcaaaagtatttgaggaaatagggcttttgtaaagttaaacatgaataaatttcggggctagaagacgggactgagattcaggagactggaatttctagacaaggaagattgatatttgtatagtctttatgcactttcccttgctcccggtgtagactcctagaagccggtggaaaggaaatcatgctagatgaatgaattggatctgaaattaagcctgcacaaccagcaggccttctgggtgaatggcagctgtgagtggtctggaaagtccaccaactagtactgttgaccctgactgtgtcaggcttctcttccaacctgttgctcttcagtagacacagacctagtgctgagtgactggagccttctagcatctcctccctggtggcctgagccccagctgtggttgggggagatggggagctcccacggtgatgtcaccattgtccagtgcaaccttcccatagcatgggtctctctccagctgcccatctctctgttttttttcagagccatttcagagactgtgaagaatccaggtgccatgtcttagtggccaggatgttccctttctaaaatgaggacagagcccaggagataacccatcatgtccctagggaactgctaatgccctccagatgtgactcccgtcttcttccctcttctctctaagaggcacaaaaccagactccaggaggactcacatagctgtgaagtttgaaaaaacaaaattgacctggctgaaaaaacaaaattgacctggctgcagaccagccaagctggtaaagtatcagctggcaaagactgtggctaccagcattggagcagttgcactcaaaaggagccaaagtgcctgtggcctgcggaatagggagcttgtggaatttctgaattttaatcagaaaagcaatctcttctcttagcccagaggttgtcccaaggaacacaagaaatgttccatctgattcaggaatttgcagaaagggaaggtttcgtttccctctaatgtgtggcggttagaaaattctgggccattatggcacctttggaaacaccccagtcaaaatcaccattccatggataggggcacagcactttgcaatcacttgctgttgaatccctttcagatgctactgatgggacttccagaaccacagccagctttcttaaagcaatgactcagtgcagttctcatagagttgatggaaatgccaatgagctgatgaaagttatctcccgtctataaataccttcagctttttaacacccgcttgctttagacactcaggagggacatgggctcactgtgcaagacgatttgcactgcccttgcttttcccagctttccaatctgctttttccagaaaagtctcactgatgtcatcaacagtgcccttaccccttaaaaaaattcacctcctagagggcttcatagatgactttaaaacatttttagaaaaatacctgggaaggaaaagttactgggatgtacttcttcgtttactgtaactcaaatctaacccagcatttctcaatcttgcactatggtcattttggacctggtagttcttcgtcgtggggactctcctgcatattacaggatgtttggcagcactagatgccaaagtcacccactccagtggtgacaatcaaaaatgcctccagacattaccaaaattgcccccagttgagaaccactgatgtcatccaagaggacgaggtccatttaagaaacgtacttgaatctgtttttcagtctaaatcctaccagctgtcggtgtaaaataataaatgagtctagtgttaattttcctggtgaaaagaactctttcccctttcggcatggtataaaggtgcccttcatgcactgctcgtggcctcttccgggttcccgctgccatgcacttcagccacaccctcctaatgtgaaagaatgaattgtccacacagattctcagacatcacgtgaccatctagttgagtgcatgcaacatgtttccagagctttctaagcacatatttcactttttttcctaagcagaaaaatgtccagattcggggaagatagtcaaagaaaaagtcagtgaaccgacagtgacaggtttccagtaaaagtctccctgagctattattcccttaaagacttgctttctggagaggtaggcttcatttctagtctcctccccctcactggcacaccctagacagccagttgccactgtgatcctattctctgctgaattatgtcgtctttattttagaaatcaactatcagatacatattgtgaaagcactgcaagcatccacacaaaaataaatcccaataaacaatctaaaaccagcaaaagtggctgggtgcagtggctcacacctgtaatcccagcactttgggaggctgaggcagatggatcacttgaggacaggagttcaagaccagcctggccaatatggtgaaaccctgtctctactaaaaatacaaaaattagctgggcctggtggcatgtgcctgtaatcccagctactcgggacactgaagcaggagaatcgcttgaacctgggaagcagaggtggcagtgagccgagatcatgccactgcactccagcctgggtgacagtgagactccatctcaaaaaaaaaaaaaaaaaaaaaccatgagcaaaagtgtctgctttatgagaaagcattgcccaccttcaacctattatatcacaagcacccaggacagtgtgcccagcatagagtaggcactcagtagagactttcaaatgcatggatttttcagacattctgaaatgcttacggatccagttgagttacgcaacccccacacccacccagccctgtagagtaatgtgaatgttctttacaaacagttccttcagtgggcatttctcttgtggcaatgaatgtgagcagaggcctgccttggccaacaggcacactttctgtttttaatgcatctgttaggtctgatacctttatcagggcaaatgtttaccattgaactcaaagtgatggcaggggtagggagatgggaaccataaactatggctgatgttttctaatggcaagggtggtatttctgaatcaggctaataatatgcttatcattaaacctacttagggaatttccatggctaaatgttatttgattatgccactaggtcacatttttcactgatcctgtagtgcttttgcaaacacttttcctgggccagacacattttctgtaagaagctgtcctccgtggaaggccaagaagtgccgtgaggttattcatggaaatattctgaggattataaaacaaagccagtgtcctaaaatagtgtcctctgcatcagtgacatgctcctccataaacgcattgctaaggagctttcaaatgttgcattttccacaggcattagatggcttcattatcgcagtgacaacagacggcagcatcatctatgtctctgacagtatcacgcctctccttgggcatttaccggtgagtttccactccaatggcctttaccggttcacgttaccatgtttctgttgagaatcattagatctcagatggaaggtggtgcaggtgtcagggggctgcaggtgagaagagggcggagagtaaaggactgctgagttttggggacaggaccaggccgaggtcaaggtcccaggagccttccaggaaaagggcagatgcaggcgtgtgccatcctggaacaggcaaggcctggagtgggagctgtggctacagattctttttctgggtcagaaatggggactgatgagagagtcacagcactgttagtggagctcagagccatcatggaggctgacagacatccagggtcacctgacagctgatcaagggagaggacaacagatggcttgggttgaaacacggtttggggcttacttgggacatgtctgaggttgcaagtgggtagcaacacttagtggtggtaagggtttggcagcagggccggttcctgggggttgaactgctctgggaagactgatgtcttggaagaccttggggagtgaggagtgtctgggtggaccaggagagggtcggctttgcattccagaagtgcacgatggaagctccaaggtggcagaaggggctgtggtatggtcacaggccctgacagatgtccctccccactctttaccctccgttccttcccttcttattccctcctccctccctccctcctttccttcttacccattctttctcttggaatctacaataaaggttccctcggcctcctgaccaaccccggagcttctctgtgtggccctgcatggtgggccatgtgtgcctcctgttcccagggacccgagagcatgaacctttcccttcatgacagtcatttccatgactgtgtgtctttgtgtttgattaaaacacatcttgggtgcccttcacacagcctggcatgtgggtgcagggcatctgacatgcacaggcattgtaggcatcatggatcagcagaatgccaggaggccggagcgggcctgtgtctgtttcattccgacacagatgtgtgaaaggcagcaggcactggggtgaagagnnnnnnnnnnnnnnnnnnnnccctccctccctcctctctgcataagccttgctggctgtctggtaacccccaacacaggatgaagtgactcatgggtctgcacctggctggtggaggacccaccgttgaggctccctcatgggcatctggccaggcttccatctcctgccacaccattgcctgttcctgttcctaggcggcagcttcgatctgcacacagcatcattgtgaatgacagctgtaccaggagcagcacgtgtgatggacaagaaaaaaacgtcctctctccgctctcctcccagtgagcccagccaaaaccttccccaccacccccgacccctgctcatccatggataggtggccagtttatgtgatgaaaagaggaaggcttgccctggattcacacataggaaagcttgggccaggatgatgctggaggaccgcggttccctctccttagctgcccctgcccagggaacagcgtggccttgttccatgggcagcttccatctgccttggggtgatgagcccagctctgctgatggcccagggctccacatcatcctgggtcatacctttccctggaagccactcccttatcccaccattagtgcaaatgatgctgtgtgcagatcgaagccgctgcctacatttttctttgcattcgctgagcggtggcccacaaaagcattttttatgttgctaagcagatgccttcccagtaggccctaatctaacctaatctgtctcccctttgtgttccagcccatttcctaaaacgagggtgcatcaggctggtggtggggagctggggggctctctcctcttgatagccatcagaagtggctcatcctcactcggcctgaaggaggaagctgagggtgcagctgcaccttgattttcatctctggccaggaagctagtgatggggctgacaccatgaatacagaagtgatccccatcatcaccccagagaagctgggctgatctgagggtgtctgaggacagaagaggagctggggtattctttggagggcgcttgtgttttgtattgaatggcaagggctcggcagtggtaggcactgaccgaaagcaaccacacgtggcctgcttattgacctgggaatgagagacaggagccagaactgtttgggtaaacaggatttgcactgttctgctttatgctcttgtaattatctgatgacccagttgctgtacgtggcagacgggacttagaaagtaagagggaaattcttctgacttgaaattatggagcaatttaggaccactttcataaattattttctaactctacaagggccagaaatgacccgactctaatttatcaatgctggacccacttgaatgcaaactaagactctgtatatatatacccatgcccagacacatacagtgagtcagccctcaactccctggtgcaggtgagcctgggccaggcagtccccaaatttaactgcaatttactttcagctttcattatccagttttcaccaggatcttcctttgcaagtgggtaggcaaaggctgctgaggatggaaacttccctggtgcaatcagcatacagctggttgggcagaggagcggatctgggagtcagacctctatgacttccactatggggaggaagccccaatggcccaggcagtgagaggcacagtggggcttaccccaggggtagctgactgcagaacccaggctggtcaccagtctgctctggtgtctttctggtgcccaggatttgggtcataatttaggaattctgattttggtttggtttacttagatgcatacttaactattaaatatcactccttgtgagcccaggtcctttccacagatgatgcaacatttcaaaacttgtgaggttgtctttccttttgcaattttgttgagagattttacccattaaaccttgggtgactaacactgagcacttacaatgtagcaggcaccattaagagtcactcacatgcgttaatatgtgtaggcgcatagaaccgtgcctggcccagagcgaggctgttttatatttgctctccttatccttatggatcctatgaagtacatagttacccagttcacagatgatgaaactgaggcacagagagattgaataatttacccaaggttccacagccagacagtgaagagctgggatttgaactcaggcactttggctccagagcttggtgcttaaccactcctcagaatcctatacgggacacagtaaagctgaatgttctcagagtgtggggctcagaaagggagaatgaggagctgagaggtggtggtcgctcctcgaggaagaggcggctcttgaggtggaggtcgggacacagggtagtcagggggcaggaggctgtgggccccagcagcaacgcccctcttggtgtcaggccaagcacaggctggcctgctggggtcccctcccatgccccttgtgtgactggggattggagagccattgtaagggggatgagagcagccagaattccttcccacttctcaggctgtggggcttcaagtctctctctgtttccttcacactgccaacatctcagatgtaacagaagctcatgtgatagattttcgtacagcaatttctgatgaaatagcctagaactttctttaccaaattggcagagaaaaaagagaataaaatagctgaaagtgaaagtgattttaagatgagaactggcaggcgcggtggctcacgcctgtaatctctgcactttgggagactgagctgggtggatcacttgaggtcaggagtccaagactagcctaggtaactcagcaacacccgtctctacaaaaaatccaaaaattggtcaggtgtggtggcgcatgcctgtagtcttagctacttgagaggctgaggtgggagaatcgcttgagcctgggaggaggaggttgcagtgagccaagatcacgccactgcacctcagccagggtgacagagtgagacctggctcaaaaaaaaaataacaataataatgagaattgttcagcagtggcagcaccagcacattttggtgtctagaattgacacaggcaaggaacatgagcaagacagacgtgcatacaatggaggccaagggctcacgggagcctctggaatgaaaaccttgcgggagagatccaaggggcatgagtcacgtgccttggacagaatggggaaagagtacggctgaggcagaaccaaatgagagaccaaaagtaggcataatctgtgtttcctgtttgggcttttatttgatgttttgaaagttagcttcctgggttactttctgatttgttcctagatgcagtgttgcctaatgagctggatcgtgctaagctcttaaggcagacatcatatccccagccctgaacatttgccatgtgcctaagtgttcattgaacgagggactgaattcataactggggttatgagcaactgcaagcagcttggcacgggtggggagtgccttggatgtgagaactatgtgcatggataaccctaccttccccaaagaaaacaaggcacaagtgttcataaaactggagaaatctgcaggccagaaaatacttctgtatcatgctggctcgccaggtacaagccccagcgagaagaaaatacaagaccagaatgggatatggagccaagttcctgtggcaggggcacagcaggaggagatcccaggaaaggaaagccaaagcccctggcctgtgttaacacaaaacacagcagcaaggccaaagccatgagacaccttttcaggaagcatccctctgcccttcccaccccaccctgccctcacctgctggaagctcccatctgattgatccacatcattttgtcagaggtgtccccgggtcggagcagagccctgacaggtgcagctgcagcttagagttgatcatggattaaaagattccaggcctctagttagattttttttatgccttttgatttttatataccataaatacagattgtgtataaaacatatgttcagtattaaattgaccaagtgaacatacatgcagctgtcactgaggtgagcaaatagaacatggctgggaccacagaagctcctgtctgcccctttttcgtcacacgtccaccttccacttggaggcaaccattttcctgacttttaaggtcattgtttgcttgttttcctttgtagtttcaccaactttgacttcactgctaaactctttagtatcgccttttgtttcactgtgtataaatggaatcattgaaaatggactcttgtgacttctccttttgctcaacatcgtttgtgcttcgcatctgcctcacactggcagatgtagctgctgtgggctcttcttattgctgggtgtgttccatcgtaggaatgtgctgcaattcctgcattcatcccagttagggattcttggaaggtgcttccatgaacatcctgtagtgtttcctgatgaacgtttgcaagcatccctggaggactgactagatgtagaatggctgggttgagggaagttctgcctccacctttactaagtaacaccagaatgatgccatagcggtggcaccagtctgccctgcaccagcaaggtggagacgtcgcagtgctgtggcatcagaacttggcattgtcagacttcttgtttttgtcagtctggtacatgaaggtgtctcatggagttgtactttgcttttctctcgattaccaatgagattgagtgtctctttatatgtttgtcaaccatttagatttcatcttttccgaattacttgctcaggtatttggacatcctctttgattgggttttttcttgcaattatgagtaggctttctttccgcgatctggacacaagttgtgggcaggtattgttttaattacctctcattcatcccaccctagggtaatgcggatgtctgaagactccacagctgacactggatgaggccaacagcagttaattagtcacagatactcacagcccagatgaggaccacacagggccacagggggctgcacgtgggaaaagagtgaaccagcaggggctatgggaagcaggctgtgcagtaagaagagggtgaggtgacccctggtccccacaggaggacatgattgacatgtttgaataattccacaacctgctactcagggatgagcagaaactgtacctgtccccatgataagagatgggggcttggctgggggacctcatccatgggtctgtgtggggagggaacctgcagttaggccatttgaggcccttccgattttaccagatgccaaggcagcatataatttagaaccttaattttgggccataccacagacgtatgtgttgcaaataccctctctcactttgtggcttacctttcccccttttttagggcattttgatgaacagagattctttctgtataattggtaccttttatatctcaattaattcttactattacaaagtcaaagccattctctacactaccttctgaaagcttaaccatatggccgttagtttgactttgaatctaaactgaatctaagtggatcaaatatgcctccaacttcctggacctttagggagaccaaggccccagtgacttctcttaagccgttcttttctcaaggtgaagtttctccagggctgctcaccattgcctcttctcactgcagccagcacagatctcaagccaaaactgccagagcgcctcagggacgctctgggaggaagtgtccatccagcctacttccagctcagcctcagtgtgcttttagtacaggctcatttaacatagctgggtgtccctgcactggtgctgctggttcaaggcccgtcaggcaattaggagagaggactgcccacctccacaggcaggtgaccttcccgatcgtgggactcggctgtaaagacggctgtggatggcacattccctcccttgtctccataattgctattattttaataaacagaactcagctcattcaagggaccgttcaactgccgatgtaattttctcacctgtaagcactagggttaaaaatttcaagttatcattgtttgtgttggttttcagcatgtggaagtagcataatagcaatgtactagcaaatacatgcaagagccaagcacagtctggggccctttctgtgtgttaattcaccatcctcgcaacctcccacatatcatacctgcccctacttgcatccagcgttcgtctttattctgtgcagaacccgtgtcctgatattggccctcggacctgtatcagtaaagttctctcacacaggtgacccggccaggcagccactcagccttgctctctgccacacccaccgtcaggggaagtggcttcagatggagccctccaagaagaggccatggagtcacttagttttcattttcaagtatttgaaatatctttatgaagaaagactactgtcatctgtgaacatgagtcatcttctaaaaaaactagagagaatgggcttaaaataaaaccaggaacatccgaagaaacttggagaaagccagaatgagaaatggtagcatagacgagagaggatcctggtagagtttcgtccataaagataaagaccggtgcgtccgagccagagcctggaagccatgctgagtccttcctttccctcctcctgtcctccgatcagccaccaagctgtgtccactgtcctcacacccaccggaacactgactgcaggcagggaggggctctgcctgcttcccaacgtgtcttccccatgcccaacagcggctggcacatggcggccctcagcaagtattgtttggactacgatattgatgagttgcctgggactctgtctgctcctctccactccttcccctgtctctcttgggaccctggccattgccagcctgacttccagtgctctctccttccagactacaagcaggatctctttaaaatgcacgagcagttctgccacccccttccttcaggttcttcgtggctcctcctggcacagggtcgagccctgactcctccgaggcctctctcatctgggccctgcttccctgtgcaacctcctctctcatggcttctcgccctccctgttgttcccaccttcctgcagtgctgtcagggtacccaccttatgcctctgtgcatgctgagccccctggctggagcaccttcccaccctgtctggcagacactgtcttgtcccctggctcccactcaaggattcctccctctggaaattgttccccaggagtctcctctaccctttcattgtggaggcagcacaccatccacagtgttctccgggcaccttgttttaatgcctgtcatagtgctggccacgccattctttcagctggtcagttcagtcaccatcctggacatcagggatgtggtggtgaacaaggcactgggccctgctctcctgaagctcctgttggagagagggaggcggaatgctcaagtcagcacatagctgtacaggaaaacgttactgtggtgcaggtgcccttgtagtcattctgtaactggtcattcagtgcctaatcgcacttggcatttattgaatgtctgccacgtgctgttttatcagcagtggaggcaggtgagctcatggaaccttcatggtttcctcaccttgcagctgaggaaaatgcagcatggaggggtagaacctgctttcaagcctgggctctgagctctcacgccttgccatgtcacctgatgtcccatcaagggggtcattgtcccctcagagccccttaaatcatcagtgggggtggagggtgtcacctggggctttctcagaggaagtgacttcaaagcagggacctgaaggttgcacagggcttcgttaaacacaaggggagggtgcagcatgttcctgcctgagggaacagcccaggtgaggctcggggagaacagaaggcaaactggaggaaaaaaggctcggaaggattagagaagtgctgggagctgggagaggcagaggctgagctgtgaagagctgtgaaattgtgttgagcagttgaggctttgttcctggagcagtcggaagccaagggacagttgtgacttgatctgttatgaggctcctctgactgctgatggagaacaaattgcacaggcactaaagtggatgtgggaagaccagtttggccaaatcattcccaggcaagagaggatgggggtctggactagggtggaagctggagaaatagaagtgaatggagcagagaatttgagggagaaaaatgggcagtactatggacactgtttggtttgagggtaaggacgagaaggagagaagacaaaggcgccaccagagggtctgggacaggcagatgaccaactgatgatactgttgatggagatgcaaacacaagggttggagatgatatgggtgggaaagaatgccgatgttcaggacatgtattcatctgtggtccccagggagcatctgagtggcagttggaaggctgaggctggaacatgagagagttggctggatattcaaacctgaaagtgtatacagattgtgtttgaagctgtgagagtggatgggtttattgagggaaactgaggaagagagaggtgcctgtctcctcggtccactgtgagctcctacctgcatatccaatatggtagccactagctacatgtggctgtttaaatttcaattcaaattaaatgggccaggcttgatggctcatgcctgtaatcccagcactttgggaggccggggtgggcggatcacctgaggtcaggagttcaagaccagcctggccaacacggtgaaacccgtctctactaaaaatacaaaaaattagccggccatggtggcaaacacctgtagtttcagctacttgggaggctgaggcaggagaatcgcttgaacctggaaggtggaggctggcagtgagccgagatcacaccattgcactccagcctgggcaacaagagcaacactctgtctcaaaaaaaaaaaaaaaaaaattaaaattcagttccttgttcacactagccacgtttcaagtgctcagtaaccatgtggctagtggctcctgttacgggcagcacagattacagaccatttccatcatcacagacagttctattggacagcactcaatctgaactctaccttgtatttattttgtaaccacagtgccaaggcactcagaagaaaacgtgcagttccataacttaaagacctttacgaagtagactggcagccctttgctgccctaagggtcaggaaaggaaccctgtgggctctttggagccatttaaatcaatgattggcctcgcactgggcgtgcacaggggccatgctaccccagccaaaacgcaggagtgtcagcaaacagcacttctcaagcaacaggaggactcagtccttcctacatttgtctgacttcactcttagttccctccttggcccacagacaacagcacatatgcatttgaacaaatacagccctttaggttactatttaaaacaatggagtgataaactgagagtgtccacagaaaatcagatattgaactttccatttcagaaaccagttctgcgttgttgtgaatgttcagtttttgtttttgcttctgtttttcatcttcgttgagggtgtacctttgtcctttattttctttttcagtcggatgtcatggatcagaatttgttaaatttcctcccagaacaagaacattcagaagtttataaaatcctttcttcccatatgcttgtgacggattccccctccccagaatacttaaaatgtaagtttaatttttctggttttacaagctagaaagataagaattttgcttttgaaaggaggttagaatgaattaagaagggagaactaattttaagaataattttcctcatgactcagaacatttccaagatccttagaggtatattttaggtttaaagctaaaactggaatttggaatatgtaagacatttggcttttatgtggaaaatttgaaagcagagaactcaagaataataatttattttgtgtatatgataagatttctctttttttgcatgagagtcttttagtaagaaacagtgcaaacatcagtgaacaatcagctcatcgtggaggatactaagatactaaattcatataatatcaagaaaccaactgaaaacggaataattaggtcaaaaatccaaattctgtcctcctgaggctctcacctggttatttatatacatttttgtgttctgtggaattcagacgtttttatcaaaatatttggcaacctaggtagaaggctaaccttgatgcctcgtgaaccacgggtcacttaatgaagcatacacaattgcatgaggtagcaaagctgcttgcatcagtgcaagcctgtgtccattttccatgaataatctgtcctgtcgtacatctgattttacttcaaagcaaagcaaaaagattaaattaaagggagcagctctatatgagccgctttattttaacataccatatgaaaacagccggaactaatcaatgccaacattaccaaccacagacatctgggagcaaattaagactaattgggtccatgtatggaatgcaaaatatctatgaactatggaaggaaacccctgtgcagcaaggttacaaaccaggcccaaaagtcagtcgtagtgagagaactagcctggccatgtgtagactaaatcccataagagttttcacagagacgctacttgtttagagtctgtgcaatgctcacgacccctttctctcctcttcttcctttaacggcccagctgacagcgatttagagttttattgccatcttctcagaggcagcttgaacccaaaggaatttccaacttatgaatacataaaatttgtaggaaattttcgctcttacaacaatggtaagctttaattgtcatataattgtgacagtgtcttttctcatgcaaacgtgcacatgggggcattaagaatcgcccagggaggaggagggagaacgcgtgcttttcacatttgcatttgaatttttgagttcccaggatgtgtttttgtgctcatcgatgttctctcccattcaagaggaacacactcccacacctgtttgtgccagtgcacacagtcccactgaaacacacattattcgtttatttatcttcgggctgatgaaataattctgtactgtgagaaacaacatacagggaataaagaacaggctctgccaaacaggccttcgtggtgacttgatgatccataaccttgccttccacactgtttccctccccctgcagtactgtcatgagcgtattttagtagacctggtccgtaggtcttctgctcactgtggccctcatgcacagcaaaggggtcattttacaatgagccaggaatctgcattggatgaattatcaagcaggataagccaagtagcaaagtcttattttctgaaagtacccggttacctgattaaccaaactctggctacagagacaacaactctgaacgagactaaaacacttatttttacttttgaaccatgcaaaatggaaatgcaggcctgaggccaggaattcagaaaccaagtcctaagccaacttggttatgggctgagctcagcatggcctgcattttgttttctgggctcctccaaactcaacacaaaacaaataactttgaaacagctaacatttcataaagcagcaaagatggaaaaaaaataaaataaagcattgacagggaatgggggaaaaaagaggaaatgagaaaaataccaaaggaaacaaaaacagaaagatgagctgcagaaatgagggggagatgcagagagcagatgatgacagcattaacttctgctgcgttcttgaccactgtttcactctggacgtggtgggtctattccctcagtcaaatttgtcccagggtttctattagaaacagccaaagtaatggcaccaagtcctcacatctaaccaggatttttccttctacctcagatggtcctttgttgtatgttatttgcataaatatacatgctttgtttaaaaggctccaactagatgctaaacctttagtgtgatcctgccagcatgattttcaggtccagggtgcagggcttatgcctggatggtgggctccttggccgactgggaggcctttctgggaacagacccatccagggcttaagatggtcggaagtggtgggaagtccatcgtcccaggtgggcccctacatctgggcaaagtcagatgaggccaaggcctaaccatgcctcatcctactcatctgaaaggcttgtctaaacttcatgaaatgaatgtttaatgaaccacacaaagaagtaaatggaagctctcgttgggctactcagttaaagaaactgacctaagaggcaccttgtagagaacccagcatcgtactaaccctagcgcagtggttctttgggtgaggcaacttattaaaatgcagactctcagcctttgccctaaagagtctagctcaggagatgggagggtaggacccaggaatgtgccgttggggagtactgtggggttctggttccaggggctgtggactttgaaaagcactgtcctagtgtgataccagtgccattctgtggagaatgcaatggccttcctcccagacaactttatcattgagttaatgtaaacagtgatttggaatttgctttacgtgtgcactggttcctcaaaagattaaacatagaactagcatatgatccagcaattctacttatgggtatgcacgcaaaagaagggaagacaggaacttgagagatatttgcacacctgtgttcatagcagcattattcacaatagccaaaaggtggaagcaacccacgtgtccatcagtggatgaatggataaagaaagtgtgatatatacatgcactggaatattattcggccttaaaaagaaaggaaattctgacattctacaacatggaagaactttgatgacattatgctgagtgaaataagccaacagcaaaggacaaatattgtatgattttacttacatgaggtaccatagccaaattcatagaaacagaaagtagaatggtgagtgccaggggctggagggagggggaaatgggagttgctaaatggggacagagtttcagttttgcaggatgaaaggagtccttgaggtggatggtgggatggttgcacagcagtgtgaatatactcagccctactgaactgtgcacttcaaaatggttacgatggcaaactttgttatatgtgttttaccacaatttttaaaaaatgatggccaggcgcggtggctcacacctgtaatcccagcactttgggaggccgaggcgggcggatcacgaggtcaggagatcgagaccatcctggctaacatggtgaaaccccatctctactaaaaatacaaaaaattagctgggcgtggtggtggcgggcgcctgtagtcccagctactagggaggctgaggcagaagaatggcgtgaacccgggaggctgagcttgcagtgagccgagatcgtgccactgcactccagcctgggcgacagagcaagactctgtctcaaaaaaaaaaaaaaaaaaagatgtgctttggccataatggcagctactgtgatagcaacataccccagtggcctcgtgcacagagggcaaagggcaaaggcaccctggccctcagggcaccaagactgtgggaatcataggatgctgctccctcttgccccatgacaacagtgcacacacttcgggcagatcacctgaggtcgggaatttgagaccagcctgaccaacatggagaaaccccgtctctactaaaaatacaaaattagccgggcatgatggcgggtgcctgtaatcccagctactcgggaggctgaggcaggagaattacttgaacctgggaggcggaagttgcagtaagccaagattgcaccatttgcactctgcctgggcaacaagagcaaaactctgtctcaaaaaaaaaacaaaaaaacaacaaaaaaaaactagcctgtgattggctggcgaacagcagttgtatcctttgtgaatttacatttccatgatctcattaagatgctgctgaatatctctttgaagcatcctgtcatttaccacatcttggaggatttcaaggaaataggcaggcttcattctgaatacctgggactttttttttttttaactagcagggctctactttcactatgggttgagatagtgtttgtttgcctgaaagaatgtgtggaaattatgtgtgaggttttttttttttttttggaaactattactgctgtaaacacgcagcactgaatgtggcaaatttaaaagaaagagtgcggagtgtcttttcagagtctgttctacaaaccagcattaaagaggctttcttgagacaagagttccccatgtaactgtggagtacgtgaaatatcattctaactgggattaaaatagcaaaaattgtcagagacaaatgaatttctcaggttaaaccctataaaggccagatgcagtggctcacacctgtaatcccagccctttgggaggccaaggcaggagatcacctgaggtcaggagtttgaaaccagcctggccaacatggcgaaaccccatctctactaaaaatacaagaattagccgagtgtggtggcattagcctgtaatcccagctatcaggagggtgaggcaggagaatggcttgaacccgggaggcagaggttacagtgagtcgagatcacgccacagcactccagcctgggtgacagagtgaaactccatctcataaaaaaaaaaaaaaaaaaaaaaaacaccctataaaattgccaacatttaaccaccgtgacctatgagatatgctttaatataagaactcaaatttgacttcataggtttacttctgaataaacattgaacaatgaggtaacaaaaaaagctcaccctaggagtgctttctaagcacccggcccagagttcaggctttgcattgatcgtgtaatcctcgccacagccttttgaggtggtttatggcatcatcccatcttcacagaggaggaaatggacacgtagaagggttgcatctatgatgtgtgagtgggaagtcaggggcccacattcacagccagaccctctaacccggagcccacactcttcaccccagtgcctgctgcctttcacacatctgtgtcggaatgaaacagacacaggcccgctccggcctcctggcattctgctgatccatgatgcctacaatgcctgtgcatgtcagatgccctgcacccacatgccaggctgtgtgaagggcacccaagatgtgttttaatcaaacacaaagacacacagtcatggaaatgactgtcatgaagggaaaggttcatgctctcgggtccctgggaacaggaggcacacatggcccaccatgcagggccacacagagaagcaccggggttggtcaggaggccgagggaacctttattgtcgattccaagagaaagaatgggtgagagagagtagtatgaataagtgtagtgggatctgggagggaggagctgtccctaattatctggtgtctgcccggggattggttaagtcaggggacagggaccaggacatgagagcctgaaggacctggttggggtgtgagctttaggtgcgttgctttgcatacgaaaggtacctggaagatgagttgtttgtcctctctaggaattggctaaccctgggagaggcagtccctccagcaccagcaaggccccagatgtcaaagcatcaaaaacagaaaccagaaaatgtgggccaggcacggtggctcacacctgtaatctcagcaatttgggaggcagaggcgggcagattgcctgaggtcaggagtttgagaccagcctggccaacatggcaaaactgtgtctctactaataatacaaaaattagctgggtgtgttggcacatgcctgtaatcccagctacttgggaggctgaggcatatgaattgcttgagtctgggaggcggaggttgcagtgagtggagattgtgccactgcactccaacctgggtgacatagtaaaactgtgtctcaaaaaaaaaaaaaaaagaaaaaaaagaaaagaaaaaagaaactagaaaacatagctattacacaagcctccccatacaacttctccaactccaagttcccaggtgtggtgacagttgaaaaaataagatgtaatattaataataataggtaatatgtgtagaagaaaaatgaccactaacatcatttttttgttttttttgttttttttgtttttttttggtttttttgagacggagtctcgctctgtcacccaggttggagtgtagtggcgtgatctcggctcactggaacctctgcctccagggttcaagcgattctcctgcctcggcatcccaagtagctggtatcacaggcatgtgccgcgatgcctggctaatttttgtatttttagtagagatggggtttcgtcatgtttgccagggtggtctcaaactcctgacctcaggtgaccccaccttggcctatctgctgtatttttataggacacttgctcataccttgatgaactatttaggaaacccaccttggtccattactgtgaaaagtcttagtgtttctgctgggcagtttagttagtggagtgttacatggtacattcttatttgatgcctgtcctttttatatatatgtataaataatggaatgggaaggacagcgacccttactgtacccgcttcctgggcctagcatggtccttacccagcacataaataagcagcggataaaaataggttgacctaaagtgaggcttgatcttggccccgggacacagctggtggagggcagagcagggttcagaccagacttgaggcttagagagcttccctaggagctaacagagctctctcctagaccagctccacaatacactctggggatagagtgcacttatatgcagaagagctgcagtcacttctttggccttaaatccaaagtggagattgaacacaggtgggtacgcactgggtaaactggattgtgtcactcctggtgccttgtgatttgtccacactgagggcctctgaagcagcagtgagtggctggggaagttcgtctgtgggctctgtgcactccccacccactctgtgcctcccaccacatcaagccgcctcctcacttcagctgcttgggtgtttggaggccagtagcccccttacctgatgtccctactcaggactccccgccccatgctcctgacaccctctctctcttttgaaaatattttcagttttttgtttgtttgtttgtttttttgagacaggatctcactctgtcacacagactggagtgcagtagcaccatcatggttcgctgtagccaccacctcctgggctcaagagatcctcccacctcagcctcccgggtagctgggactacaggcgcatgctataacaacctggctaattcttttatgttttgtagagatgaggtctcactgtgtttttcaggctggtctgaaacttctgagcctaagcaatcctcccgccttggcctcccaaagtgctgggattacaggcacaagccacgcacccggcttaacttttatttcagattcagggggtacatgtgcaggtctgtcacatgggaaccctgcctgacgctgaggtttgcagtaccaataatcctgtcacccaagcagtgagcacagcacctgacaggcagccagcccctcagccttcaccccctccttccttcctccctccagcctccagcagcccccggtgtccactgctcccatctttatgtccatgtgtactcaatatttagctcccacttaccagtgagtgcatgtggtattttgttttctgttgctgtgttaattcacttaggataatggcctctagctgtatccatgttgccgcaaaggacatgttttcattcttttcatagctgtatagtattccacggctaacgcgctctcttcttgctcctctgatcaactgagttggtccaagactgagagagtccctgggccaccactcaaaaatcacatcaacaggaagcctcaggccccaaaccaaagagagatgtgtaggttccagggcagaggagaaagggtgaggctgagctggagagggctctgcgtgagccttgaagcacacagacgaggatcccatcttgttgtctgctcgcccacatggctacccgggatttgtcaggctctgtacacaatgtgatggggctgagttcgtaggaatttgaggggaagggaggaacaaagcccctttgctctggtgaactaggtgacgttacactctccaactggacatgtccaggttccccagtggaggatgcccccctctcctctgcccccattcactttggcagtgtgaacacaccagccattgctcaggtccttcagccaagtggaattttcccctacttcaatgtttgcacattttggtcactccttaggacttcatcatttgccacagatgttctgggggcaggggagggaagacaggacttcacatctttaacctagatttttaataaatgtgaagaaatatgtgtcaggaaatgggacaagaaagtagtcttttttagaagagtttcacttgaggacagtttctaacccagtctgtgcaaagcctcttggagggctctgagctgggatatgtaaccccgtgtcctattctcttcccctgaaaagcccacgctggacctggccagccagcagcactggcatggaccactggtaggagcagcccttttcttcctctaatcaactgtttccagaatagagcttaacaagatgattttatttagggctatgtttgcttgtaacagatactttaaacaacaacaacaaaagagagatgctttcagacaaatacacaattccatctcttgcttctccagcgaaatagtgcctcctttctcaaaccccaggtgcccaagtcctgtagccccacctgaccactcttagtggaaagaaactggccgggtgattttcaaaggcatggggaaaggtcctgccgggcgcggtggctcgcgcctgtaatcccagcactttgggaggccgaggcgggcggatcacgatgtcaggagatcgagaccatcctggctaacacagtgaaaccccgtctctgctaaaaatacagaaaaaattagccgggcgcgatggcaggtgcctgtagtcccagctactcgggagactgaggcaggagaatggcgtgaacccgggaggcggagcttgccgtgagctgagatcgcgccactgcactccagcctgggcgacagagcgaaactcagtctcaaaaaaaaaaggtctttgctttacggggtcctaatatgcaggcttccagatcctgaaagataacttcatgcaagaaggcaatcctttctctgagcctttttgctcctcctccagacttggatgtagatgtgtgtctgacaaatccagaaagcagtatttcaaaagttgctggtgtggttccaaataggtcaccctcggcaaacattccactctgggctttccagaaaccacacaccagagtataaaagtttccctgccctcgttttacctactcgcctctaaccgcacaaccagatttgaaatactggcagaagtggaggcttttcagcttacaacactcgattttgtatgttgccgtgggatttctggaggttgcctcattttatggctttggggtggtttgaattttttaccttgctgagcttaattgagatnnnnnnnnnnnnnnnnnnnntgtttactactcgcctctaccgcacaaccagattgaaatactgcagaagtggagctttcagctacaacactcgatttgtatgtccgtggattctggaggtgcctcatttatgctttcgggtggttgaatttttccttgctgagcttaattgagatgcctcagtaaaaggaacaaagcgcatgcacgccagacctcactgggaatggagacgcgagtgtggacggcttcgtggaaggagtgtctcatctactccggactctaagagtgggaagcagagtgtcccctccacccagcaaagaatcaggccgtccttcccctgcaggggtcagtgctgccagagagatcgcaggggagttaaaatcactgtaaaaaaattgtgccccaggagcgtcatcctgcacagacacctggggttcatattaaaatggaacaatgaggaatggtcaggcttttaagcaacctcatctttctgctcgtttcagtctgggagtggggggacctttcatacaagttgtcccataatcgtgataaaaatgtgtgtgagatatccactttgaagacaggggcgagggaagttcactttcctgaacatacaaataatttggcccatccacaccaaccgtctagtggatatcttctcaacgccattacactcttctggcccctaaaaatactcattttaattaataattgccagaggaaagaagaaatatttgagtaagacatgtagtttccctttagagtcattttttaatccagcaaattgcaaagccaggccaggcacggtggctgacacctgtaatcccagcactttgagaagttagataatttgagctcaggagtttgagaccagcctgggcaacatggtgaaaccccatctcttcaaaaaaaaaaaaaaaaaaacaaaactaaaattagccaggcatggtggcttactcctgtgatcccagctgcttaggaggctgaggtgggaggatcagttgagcccaggaggtccaggctgcagtgagccaagatcgcaccactgtgttccagcctgggcaaagaaggagaccctgtctcaaaaaaaaaaaaatttttgcaaagccccagctctctcttgtggctcctgccttttctccaacattgctcttctctatgcaaaacacagctgaaacaaaggaaacagaaaggaaaggatcaaatatgccctgggtaaggtaggcagtgcccctgccaagaagtgggcaggattatcacggtgctctcctaggaacccagccacctggctattcagaacacattgggtcaagcacattgtgaagagagaaaaataagagtctgaaaatagtgcttaattagtgggagatgattcctcatgaatgtgcagaaagttattttcccctcaacattccaaagccatagcctgaatgttttggatgtttatcacgattgggacttaacaactttattcttcctggagcgaaacctcatcactgatagtttcatatcttctcagacacctgtcagacttgtttttcatttgtttcaagaagtgccgagaaagctatttgtcacttccttgtggactattagtatgttttcctccagccattgcaactaatttatcataagcaggtcgtctctgatgagaatacttaattgttctgatgactgagctggtaattcagtggaacagagccagacatctttctccagctctttgtattcttttgctgttaactaatgctattaccatttctgcatcttccttgctccttcctgagccctttgaaaaaagttctctaccacctgagatcttcctgccctcatagtcatctttttctcctcatcatggctgatttgggagctcacctttgtcatcagacagacttggaagccaaccttgggtgcttccaaatgaggcagacatgattcattctgagtcccagggactctcctggttttggaatcccaagaataccagcccaagacaaaactttctcagggtctttgaagttacagtgtaatgaaagtttcaggacgtgataacctgtggactgttttaatagaaagaccatcatgatagcacgaggccgggcacggtggctcacgcctgtaatcccagcactttgggaggctgaggcaggtggatcacctgaggtcaggagttcgagaccagccttgccaacatggtgaaaccccgtctctactaaaagtacaaaaattagcctggcattgtggcacatgcctggggcacagagcaagactctgtctcaaaaagcaagctagccctgcatctccgcaagcagaagaccacgccacgcacctgctctgttttccatcacagagtggtgattgccgtatgctgatttgcagcagtttccctgactgcagcaggcctcctgctgactagtgttaatgtatcagtcgggcagtgagctcacctgcctgccagtggaacccaggccatgtgctatgggcacctcccacagctggcagagtgaacgggccaccagcagcaccaaggtgggtcacactgcagaggggaagccaccttggggtcccaaggtctgtgtgctagttgctggcaaggatgagatggtgtcttcccgaactggaccttaagctaggatttggagatgagccgggccatctcatgggagagtcatctgataaacacatgttgagcacttgttgtgtgctcagaggtggagacagagaatgagccccagttcctgccatggggaaggctatatatttagctttcggcaagagtaaggtcaattttgagtaagatgaccctaggagggaaaatgtagcaagaatgagttgcttttctctatattgtgagtggtcagagatctgagcaaacagggctgctcctgcagttagtgggtaatcctgagagtctcaggaagccagttgtaattagatatattctttctattacttaaattgaaacaactaattgaatccttaattaatgtctttaaactaccttgggatacaaagtgccagagaagttattctaagtgctaaatatgactaggaagtcccagggagcagtttgcacctgtgttgcctctagaatatgcaagaagactcgtgctgcaggaaaaagttatttcaaatgcaactggcaaaatgttcaaagtatcttctttgccttagttttccccaaggttttctccttggcctctattaaagcattcatccttgatttattatcacccttgatcatgccctcagtttttttaagttttttggtgggaaaggcatattgaagagagaagttgccccgttctggacatctgtaaaatatctagctcatcaaatgcaggctacaaacaataatgaaacttccttttggggggtgcatttttatctttaaagacttagatgctataaaagggcagataaaactgcattatgggggcagccaggccaacagtaagctctgcaaaaca[450 bp omitted]attcatttgcaatagcctaagccaacttgtgacagatgtaagctctccagagaccactgttttttattttgcccactttatattcatgtttggaaacattagtatttatgtgaatgaattcagagaatatgtttggtaaaatgaatttattcatgttagtggagagaagaccacattatagaatcttttagaaacctataaatatatatatttaaaaaaatgattggaaagctaaaatccaaagaaaatcttgcagatttcattttataatgatttagctttctgatgctcgatatgttcctcattaacttggagaacatcatgatattccagttcagaatgtgcaggatataattgtgaaaaacgcagcacagattatcagccctgggatcctcagcctggctgcacactggtgaacctgcagagcctttgagaaggccagtgcctgggcttcaccccagagtttgtgaattagctgatctgtttagggcccaggcagcggtgcccagggtcccaagggaaccccacccgtggacgactttgagagttccacgtacgtagtaaattggcttttctcctatttaacagggttctttatcccacctaaaaaactccatctaaaagtaactaactttttctctggcccagaaggtcagtccgttctccacagttgccctggaggcagggaccaagtcccacagagaagactctgccgaggctactgcaggtgtgagacggcatcatgatgtgggcccatggctgtgggcctaggacagtcccccctctgccctgttagaaccctgggcctagagcccaaaaacttgatggcatccctgctgttatttctgagtgaccgtggttaattatagaaccattccgggcctaggacagtaatgccctcctagatgtttgagaagatgtaagaagatgcgtgagagcagattttgtcacctgggccacactagggaactagcaagttttgttgtaggcgttgtgttcctctgggggtgacccctaaatcctgagccctgtctcctcagtggcccagacccaacccctgtatcagcctgggctcccaagggggagtttcaggacagaggcccttgaaccccaggtatgccagccaagacaggggcagggaagggggtgtcaatgatgccgagacacccctactttccctgggaccatcagtatcaggaacactgattatagaattcaccttaaaacactggctggagtattcaaaccgttactgcagaatgaggctgtcttctcttttttttgtttgttttgttttgttttgttttgttttgtttggagacagagtcttactgtgtcacccaggctggagtgcagtggtgctaacttggcttattgcaacctccgcctcccaggttcaagtgattctcagcctcccaagcagttgggattacaggcacacaccaccatgcccagctaatttttgtttttgtttgtttgtttgttttttagtagagatggggtttcacagtgttggccatggtggtctcgaacttctggcctcaagtgatcttcccgcctcagcctcccaaagtgctgggattacaggcgtgagccactgtgcctggcctgtgttctcattttgtagactatttttcccagcattataagccatagggctagtggaagtgagaggcagtgctgaatgctggtgaccagcatgggctcaaatcccagctctagcaagctttttggtcttgcacaagttacttccctctgttcctcggtttcctctttttgcaatgggaataatagttgacctacctcatccagttgtgaaaatgaaatgagttaatatactctacataaaccctgggggcagcgcttggcttacagttaagtgccaactagggattggctgctgtcaccagacagggctaacctatgtgtcctcttcttcccaaccccccagtgcctagcccctcctgtaatggttttgacaacaccctttcaagaccttgccgggtgccactaggaaaggaggtttgcttcattgccaccgttcgtctggcaacaccacaattcttaaaggcaagtacctgagaggcagttcattgtgcggagctgttatgattgactcacattttgttatatgtaattaatggtcttttgggagggaataaattgcagtgaagttgtcactggctttgaaaatcgaagtgtctggcttctgtgcctgcacacacgccctttcccctgccccgtttcctgcaagtggttctctttgaaggcagcatcgcttgctgttcagcccgcagaagtgctgtctgataactgtaaatcttcccacctttcacaccggcgttaataccatgcaggccaggcctgggtgagaaccgagtgttggagcgctgggggtttgtctgccttctctcatctgtgattgcttcaacatcgatggcatgaatgttgagttaaatgagtaattcagattccgatgaaaagccattttccacatgtttgccacttctcgataatgggaagggatggtgtgacattctggctcctaggtatttttccctagcttgtgaaataaatttagtatcagctaataccgaaattagctacagatgatgagtttcagtccaacacgacttggagacttgctcgaaatgattttaacttctgttacccaccatgcgttcctcttgaacaaacctagggtgagcatctggcacccaagcaactttttttttttttctgcttccaatacaggaaatgtgcatagttgacgaacctttagaggaattcacttcaaggcatagcttggaatggaaatttttatttctggatcacaggtttgagaaaagaaaaacatatttgggttgggcccttctcaagtcttgtttgcgtgagccaggctctccttgggagagaagagtcggccctggtccattgaaagaggaggactctctggcactaggaaaagtcgtccctgccaagggtgggtggtttccctccaacttcatctgccccatcgtgaatatgttctgtgtttgggtctgatggctcagccccgggccatctttgggatgatcctcacttgaggcccttcccggctcccagtaaggcagcagcaagtgtgagagaaatctctcatctcatttttttcaacatcctttgatcttttagcccaatctttactgtttcttttgtaacattatttgcagttgaagaactccaaatctcccctccccaccctttaatttatattacactttggtgttgggctgatccaatttgtagctgtttttaattacccagtagtgataaagcttattgttatttgggccaagttatgccaagggaaaggagtatctatatgccaaaaaaaaagctgagccctttggaaaacacagcctctctgattttgaccattacaaagttatttttctccccttgttcttgagaaatgaggcctccatgttgatcattatggaaaggcatggccaccagggtgagccctgcagggtgtctcctccctgatgacaagtcctccttgtccttgtgcagagcacctccaatcataggatacctgccttttgaagtgctgggaacctcaggctatgactactaccacattgatgacctggagctcctggccaggtgtcaccagcaccgtgagtaccactgcccagcccaggcatgggggccttgcgttcactccactggggcccagcagcagggctctgggactccagaagcctctgctcgttacctggtttctttttaaggtgaggaacttggttttctctgagatgatctgggggcatggtggaggccccttatccgcgtctacccccatgtcactggaattcacttggccccaaaccctagcaccttcccactgtcatccagataggcgccctgtttaaacctaattaagaaattaaggtgatgcagggatttttttttttaagttatgcaatacatttcagagataaaataccgaattctcataactgttctttcatcagcagataagtattggtcactaaccataggccagatactgagtaggctggcatatggggatgatcagtacctacttgctgtcccgcagggcaggtcttctgggaaagccagaaatgggtgactttgtgggatgtggtcggtgcattgaaggggatgtacacagcatactgggggactcaagaggaccctcacagctggggttcagggaaggctctttgccacatacgaggcgaacacattagcaaatgtatgggggatgggacttacgatgtgggggagtgagaattacaagcttgtccgagttctcacttagcaagtggtttcaagaattaaccacttacagctgtattttcagtgccaactcttaacttgaaataggaacactgacctattgatcctaatgcatgaatcgaccactaacattgtgctttaaaagatgcctcacctgtagtacccattagaacttttttttttttttttttttttgagacagacagattctcgctctgtcacccaggctggagtgcagtggcgcaatctcggctcactgcaagcttcaccttctgggttcaagcaattctcccacctcagcctctagagtagttgggattacaggcgtgtgtgccaccacgcccagctaattttttgtatttttagtacagacagggtttcaccatgttggtcaggatggtctcaaactcctgacttcaaatgatctgctcacctcggcctcccaaaatgcttggattacaggcataagccactgtgcctggctagaactttctcttctgtggagagggaaggaagaataggcttgagttccatctggatcggctgttagaatttaaagctaatcattaaaactgtaactccttgctcctcaaagcgtggtctaggaccacactgcataggcatcacgggaagtttgctacacttgtagaatcaggcctactcagagtgtctattttaacaagatcccgaagtgaagaattacattcagcaattgaaaggcttctccatggcttgggcaagacctccttgccctgtggagcccacaccctcaatctgctgggcttatctcctcttcagataatcacattctccaagtcagtgtcctttttttttttttttttttttttttttgagacagagtctcactctgtcacccagtctcggctcgctgcaagctccgcctcccgggttcacgccattctcctgcctcagcctcgtgagtagctgggacaacagacgcccgccaccacacccggctaattttttgtatttttagtagagatggggtctcaccgtattcgccaggatggtctcgatctcctgacctcatgatccgcctgcctcagcctcccaaagtgctgggattacaggcatgagcccctgtgcccagccatcagtgtccttttgtagcgttagtttcctagttgagatttctcttaaccatttacctaaagaggtgctaagttccaggcactatggcaataaaacccaaatcattcttcttccttggatccgtagtccatctttctgccctgcccaggcttgatacaccatcagcatccattctgctctggacacccctagaaaagccaccagcagacatcactatgggggggctgcaagcagctctggggaagggggaagcctggggtggaggcatctgtccccgactctttatttgagaactgtgtcgactgggcatgaactgctgactggcagccacagaatccgtccagaggttgctggctggcaggtctgttttcgggccaattctggatgctctctcctgggctcctgcagctccaaagacagctctgcctgcggcgggaggatgagcaccaggcaaacctgagcctctgtttcattaaacctgcagtttgaaaatctgtctgcatctgcccttatctgaggatctctttaagcgtctgagcatttgggaaagtatatggatcactcttccactgtttaagaattcacgacagtgtaccgtgatcctgacagtcacttaaaatacagggcaaccggggaaacaagccatgtttggtattgtctttttttttgaaagcttatctttacaataactcttggggaaaagatcattttcatattaacattggttatatgcggaatccattttctaccgacagtgatgcagtttggcaaagggaagtcgtgttgctaccggtttctgaccaaaggtcagcagtggatctggctgcagactcactactacatcacctaccatcagtggaactccaagcccgagttcatcgtgtgcacacactcggtggtcaggtaccgcgcacgggcaggggtgcggctgcgtccttgtcgcacctgggggaggggtgcaggatggcgtggcccctgatggccaagtcagatcagcagtcactcaggtgttccccatttcgaagatgaagcccaggccatcccctgccgttaacagcacaattcccagagctcagctcgcttccaggcaccactggctctgccctcccagggctgagactcctttcaagctctcagtcaggcccctttgaacgcctcatggactctcgcaggctgccaggatattacttagtaagtgactgcttcactgacctacttacatattttcccatctctatccagcccacagccttcccttgttcctgctttgagtagaaaatttaaattttacctctaaataactcaaacacatattcccctttatttttaatgctttaaaaacccctgctggcaactgaggcagtgttgggaaaacagcctggctgccagtgggcgcgggttcctgggaggtccctgctggcctcagggagccctccacccagggcgggtgagcaggactttaaagagacgcggcatgcccagggtttcatagatgctgcctttgtggggtcactgttcccaaggatgaaggggaaaatggtcttctccccgactacggaaattttaagaacgtaaattagttttaagctggcctacagaggagccttggagaagggcaaagaaagaaaagttggaaggacagcatgcctttctttttttttttttttaaactttaagttctgggattcgtgtacagaatgtgcaggtttgttacataggtatatatgtgccatggtgcatggtgccatgcacctatcaacccatcatttaggctttaagccctacatgcattaggtatttgtcctaatgctctccctccacttgtcccctaccaccacccctgtcaggccccggtgtgtgatgttcccctccctgtgtccatgtgttctcattgttcaactcccatttatgagtgagaacatgcggtgtttggttttctgttcctgtgttagtttgctgaggatgatggcttccagcttcatctatgttcccgcaaaggacatgaacttattctgttttatggctgcatagtattccataaaattagaaaaacctacttgaaatttcatatgcatttcttatatacagccacttgctgcttgatgatggatatgttttgagaaatgtgtcattaggtgatgttgtcatcatgcaaacaccatagagtgtactggacacacctagatggtgtggcctaccatacaccttggctataccgtatagtgtattgttcctaggctacacacctgtacagcatgctattgcactgaacactacaggtagccatagcacaggtgtaagtgtgcacctaaacgtatctgaacacagaaaaggtacggtaaaaatacagtgttccaatcttagggaaccaccaatatgtcccataagcacatgactatatatatgtaacagacagatgtagacagacagacactacacacactcacaccatacatgtatcaggtcaccaaatcagccattcttccttaacacgcagaagaggggagaaacactagttttcagcagcaaatgaccctgattctacttgaccacacttcatgccttcgctcagggacttgatcttggattcccagcctgccactgggcgtgcagcagcagtggtctctgactccatggcagccgcctgttgccacccagcctggtcctctgcccaagggccccctacccccagggaaggctgggcagcactcacccctcacccttcaggctgtgccctctaccagctcttcttctccatcctccacctctcaaatccttggaagaaactctcagagaaaggaggaagagaacagagtgaatgaatcaggtggcaggcgttccggaggcccaggagccacgttgctttccaaggcctcttgccccagggtctccacactcggggcagaggcactgtagggtcagctgggcgtccctgtgttgagttgatttacccacactgctgaaaagtgggcctgtgggctcatctacagtctggatttggctagtccgggttggtttgagaggaaactttctgagaaatgtaactactaaaaaagttttgtgtcactcttccatatgcacggtccagactgagcaggttttaagaaagccttctaattatttaaaggcagaagcttatcccatagacgaaaatgtgttttttaaagacaattacaattggagatttcagggaagtaaaaagaatagtaaatgagaggggaataaagacatcctggaaataaaaagattttgaatgtaatattataagtcactcaggtcgaatttaaggcagagaacgacgctcattccttccaacaagtcacaggctaggctcctctgtgttgactgttgtggggggcaggggttacgtagagaacctcgatgtaccttgctgtctgttcaggtggtgtcatcccttcctggaatgccccatctccactgtggtctcttaatttcctgtacagttacgcagatgtccgggtggaaaggaggcaggagctggctctggaagacccgccatccgaggccctccactcctcagcactaaaggtacgcccatccctgccagatggatacggcaaaggttggctaggaagaaaatgcagccaaccagtctctgaaacaagggtttcttttcatcaatggaagggtacaaccaagctattcaggaggctgaggtgggaggatcccttgaggccgtcacattgaggctgtggtgagctatgattgtgccaccatactccagcccggatgacagagtaagactctatctcaaaaaaaaaaaaaaaaaaaagagcctgcagagctgggctagacacagcccctggactcaaagcacggctcggcgactttccagccttacaagcatgtctccagtgagtccactcggcatctcctccacagataagacactgggggagttcctccctccccggctgggttgtggaggaattccagagtccctggtcttcctttgcttgagggccgtggcactgcctccaggacccaggcaccctatggggagactgccctcacgccactctccctgtcacctgtgctttctatttctgtgtccaggggtgttagtgaacatcatgctggagccagctctgggtcagcgagccctgctgtagaaaggccttccctccacagagtctcttccatccttccttccacacactgagccctctactcgcctctgcctagccagacgtctctttgtccctggtcctggtccatcacacagcttcagggaaccttggggatcatctgcaagtagaccagagccctgttcctcggagtccattcttaaagcagacacaaatgttgggagaaaaaaaaaagcaagaaagggagggagtgttgtatttcatcaaagttaaggaaggtgtcaactggaagatccatatgaatttttcttttttttttttttttgagacaaagtctcactttgttgccccagctggagtgcagtggtgcaatctcgatctcggctcactgcaaactccacctcccaggatcaagcaattttcctgccttagtctcccaagtagctgggattataggcgcccaccaccacacctggctaatttttgtgtctttcatagagacagggtttcaccatgttggccaggctggtctcgaactcctgacctcaagtgatcctcccacctcagcttctcaaagtgctgggattacaggcgtgagccactgtgcctggcctccacctgatttctcccactgagagaaaaattgctgccaaccaatctctgaaacaagtgtttcttttcatcaacggaaggacacgtcttaatttcagaagtgttcaaatgtgagtgctggagaggggagtacctcttagaactggtgaagctcaacttccagggtgcccagtgactgcgaatccagagccttgggccagaggctggtgccacagcaatggtccagtctttcaggctgtctgtggtccaacagaagcatctctcacccctgaagggccaagttgggaggaaggagaaatcacctttcaagatcagagagcagtgggtgccttggcagagcctccccggctgctgtgccgtgtggtggtgtgttccatggcaattcatcaccagcacgctgataggacgcagctgacattgtttattacccagctgtgtcacaccatacattatgtatcacgtcatagaagggaattcagctgctaataggcagatgttagacacaccatacatcatcgctgaagaacaggtgtagtgtgtatcatccagtcggaaatttatcattgaggtttctgatccttggggagtcctggagccctgcgaaagaatgtcttctcatcaaaatgcatatatgtataaatacaaacgcaatcgccgggcacggtggctcacgcctataatcccagcactttgggaggctgaggcgggcagatcacaaggtcaggagttccagcccagcctgaccaacatggagaaaccccgtctccactaaaaatacaaaaattagccgggcatggtggcgtgcacctgtaatcccagctactcaggaggctgaggcaggagaatcgcttcaacccaggaggcagaggttgcagtgagccgagattgcgccattgcactccagcctgggcaacagagcgagactccgtctcaaaaaaaaaaaaaatacaaacacaatcttgggcactgggttaagaaatccctttaaagtaaaagctcccaaactatccgtggtattgaaccagtttggtttttatagcttcgctgtctgtcactgtgcagtgcatttgtaaaatgcagattcccgtgtgtggacgtgatgtgcagagatgtcaaatgggcatcaaggttcctccgggcttattctcgcttcctggaccgacttctctgctgactaggaacacataattcacaaacagccgtggtccagggaccccgctctaaggagcctggtcaaaggcaaactgtaaccaagcagcaaggtccccaaattgccatttacctcagcacatccagccacatctggtatttctgttttgcacaaaggcctgtaggtcacatgtcagtcacttcattcctactgtaggtgtacaatatccacccccactgcagccgtgacacaaaagacaaaacggccacgcagacgcacgcatgggatttcatacccaaggccatgggacacagaccagcccattgacatagcccagagatgctggcagtttccattcttctaacactagctaggaatgcggctcaggagggtaatcactgttttgttttcttctttagcttaaaaattatcccaacctttgtttggtttattattatttttttagacagagtctcactatgttgcccaggctggagtgcaatggcatgatctcagctcactgcaacctctgcctccgaagttcaaaccattctcctgcctcagcctcccaagtagctgggattacaggcgcctgccaccacgtccagctaatttttgtatttttagtaaagacgatgtttcaccatgttggccaggctggtctcgaactcctgacctcaaatgatccgcctgcctcagcctcccaaagagctgggattacaggcgtgagccaccgcacccagccccaacccagcccctgttttcatgtgcctataacagctaagccacagaggatggaaaaacggtccttcggagtcagactgtcacagctgctttctcgtcacactgtatttgaagcagagacatcctgggagccagggtcagtcaggagcgagaggtcgaaagacaggagaccccttgccctccccggttctccactccaggggacactgaggctgcagagaatgagtaacaggagaaagcctgggaaggacccaggaaggtccaaaggcacctgtcccagtggatgagtttacagtccactgccagcagcaaccttatttctagaacctccttcccccttcttggaaagtcaagatgctgggtggtgaggtgacaatgttgaggaaataataaaatggaaagtcagttacgaaaatgtaaataataaaaacaaaaggcgagaaagggtaataaacgctgcttttcggctgcaagcctctctgaggctttaggttacgtatatgtatatactctacccaagcatctttggaatcgtccccaaacaactatggtatttgtctcagcagcttctgaggttgtcgacatatttagaactaaagtcacgcccactgattctttcctcttgatgctgacatgaggactgtttgatgtgtgtgtttcaggacaagggctcaagcctggaacctcggcagcactttaacgcactcgacgtgggtgcctcgggccttaataccagtcattcgccatcggcgtcctcaagaagttcccacaaatcctcgcacacagccatgtcagaacccacctgtgagtgcgagtccatggatggggagtgggatgtccccatcagaccagagggacagccccacagagggtcccgggcccaagtggaatcagggcagtctgtgcctccgacagaggttgccgtgcagtttatactcctcctttcctttcccagacttcccgcctcctgatcacctctccacactctggtatccattcattgccaagcaaagacattgagtgggttgtgcacagatctgatcccttgactgcttttagtaattctggggaggcgtctgatcaggcagctcattggaccaagcagccgaaatgaagtttagggagtgtttgtggtgtctcctacctgctcccaggctgggcttctgtggttcagctcaaccctgcatggtggacttcctttatcagagatcccaagcgagctcttgtactgtgcacaccacggtcatgggtcccctcttcggatgagtacatgctaagtacatggaagttagaaggtcattcgttgctttcttacagccactcccaccaagctgatggcagaggccagcaccccggctttgccaagatcagccaccctgccccaagagttacctgtccccgggctcagccaggcagccaccatgccggtaagtgtgtgaccccaaactcctccacgggtgtacgctacaatgtggtgggggctgcagagccaggcgatgtgctgcgtctccccagagaatccgttttacttagggattgagagtgtagggtggcagatgggggtgggaagttaagtaatttaattggcaactaattttaaacatttgcatgacaaaattaacatggatgcatatccattagaatacaaaatccaagtgaattttaaggattaaaggcaaaactgcaaacccggggtcataccctcatacccccagagcccctggggctacacaattaggattcttctgttttgaatcccctttcatgctggtgaaaatatttgagcagctcagtgtcaacaaaaatgtacctctgcacatatcaggtagcgtccccaacatgtgccagatccttccagaacatcgggatgtatggccctggctatatgtaaagtcactggcatgcaccactctggtcatctattgccaggtagcaaactacacctaacttagtggcctaaagcaaccacatgtatgaagttcatggagtctgggtcaggaattcagaaagggcatcatggggatggcacttctctgctccttggtgtcggggatctcgtgggcctaggctatggaatgcacccaccagatggtgtctgcacatgaatgtccagcagccgggctgggtggctgagggctgggctcagctgaggccatccgtcattgacttgcatgggcctctcaagccttaggcttctcctggcatggtggtggactccaggttccaagaggagacacctggagacgcaggcaggaaccatgcagacctctgtgacctagccacggaagtcatatagtatcaccactgccatacctcttggtcaaagcagccctgagctcacccatgaagagggatatagacctccacttctagacgggagaagtacccaggaattttaggggccacctccagatagttgccaaacccctcccacccacacttcactgtcactttggagatggagtgaacgtgccaccttcctgcttgctgtctccataaaggctgtgcacaccctgcttgagaagcttgggcgatgcgttttattttcaagtagaatgtggcaaagaccacttactttctctccagccacctccagatgcgcttgcaagctgtgcctgccattcttccagactctcctgtccagtgtgactcactttgccaacaacggaggcccagagtgcttctgtctcctcccagctgcgcagggaaacagaacccagaccagcttctggatcagccctgtgcctgggatttctcactgaaacaaggtctcctggtgtcatttcctcccaatgctgtcctgggtgacactttccatttgagctgcttttttatataggccctagcaactaggggccgtgtcggaataacttcagacgagtcctttcactgttctttaaaaaaaaaaaaaaccactagaaaaccactagcccgtgaagcagagtgtttcatttcttgttactatacattgtctcccccacccacccgagtgatcagggagcgcagatgtgactcagctcacttcccaggagtctcttaaaaggttctgggcagaggctggtgaaactgccccagtcctcactgcctggatgagttcatggacaaacatgcatggcgtgtctgtccatctgcattagcgctgagcagaaaagatacggacgcacagcagctcatggtagcagtccacgcacgtcgtcctgcttgatgacaccgctaagaattaatccatttgggaggagagcaaccaaatccacccagggcggagtccaggacagcaggcaagggaagggaagtagagctgagctaccaggcttgggcaggtagcagcagcctggcagagcacactgtggtggggtggaagcctgcaccagttgtgcaggggctctgcccttgtgccctgcgtaggaagcagtgcagccagggaacagacacctatactttctagaactcttgacttggagctgttcaccccagtgcggaacgcagagaacccaccggaccaagagaccacatccctgtcccctggaatggcagaagcagtggtaacaaagcccctttctctcccacaggcccctctgccttccccatcgtcctgcgacctcacacagcagctcctgcctcagaccgttctgcagagcacgcccgctcccatggcacaggtgagtctgggacccaggaaagggcagcccctctcaagccagaagtccgcagtgtgctgcgctgatggtcttgtacacttaggtcccaaccaaggccctgacgtgggggaatgtccctcccaatgtgtgtgtggcctgtgtcgagccatgaggttccccccacacccaccctctcgtctccaagttcttttttccagtgtctggggttttctttttttaaatttcagtagttttgagggaacaggtggtgtttgattgtatggataagttctttaggggtgatttctgagatttgtgtacctgtcacccgagcagtgtacactgtacccaatatgtagtcctttatgcctcacatccccccacccttgccccaccagtcccaaagtccatcatttcattcttatgcctttgtgacctcatagtttagctcccacttagaagtgaaaacatacgatatttggttttccatttctgagttgcttcatttagaataatgacctccagctccatccaagttgctgcagaagtccagagtctgtttttttaattcttttaacagtctctgttcacctctttgccacttttccacattcctcttgttctttacgactccaaattggccatggtattttagaaaaggtctgaattgggctgcatgtcatagaaagactgaaaggatctaaaagccgtgagtccagcactataaatatcacatttgtttaaaaaaaaagaaagaaagaaagaaagaaagaaaagaaaaggattacggctttgctgagtaattccatccttgtttcaacaacattcggtgagttactatttgggtcagtcagtgagcgaggtgttagggatgtaaagatgtaagtcagcccttgcttttagttctcagaactaaagggagagacaggcatgtaaacagagacgccgccgtggcagggcatgcgtttttatagaaccgtgaaggaaatattctacccagggaagtctgacgtggcttcctggaggaggtgacgcttgagttggccccggaaaggtgggtaggaggttgccagatggtttggcagggggacagcagggatgtgcttcagcagggagttctgaacacggggagtgacaaaccctgcccaggcctgagctctgacttcagttccctcataggagacttagctctgcccagaccatggccacaggctagagctgcgtcccagacggcggttcagcagcaggtgcccctctctgtcttggcacacatctgtcaccactgatgaaaactatttcggaacatatgccctcttagtgggggtctctcatgcattcctggagtaagacacatgctaacgcgtgctgcttgccagagtcaggcttgaagattggtgtaaaaaagctacccttctggaatctactcattaaaactgcctatattcaccctcattaggccaaaagaaaaaaaaacctgaatactgtttttctctttaaatttccaaggcctatttggtaagaaattagtaaccttttaatccaaaggggcataaaatgaaaatgtctttaacttctgggtcttgcattatgaagaatgtctgtgtttacaagacacgatggtgtgatgcaggctcttttggaattctgatttttcatttattgaacttcttagtctggcatgtgtactatatttaataataactatatatatatatatatatatattttttttttttttttttttttttttctgagacggagtttcactctttttgcccaggctggagtgcaatggcaccatcttggctcactgcaacctccacctcctgggttccagcgattcttctgcctcagcctcccaagtagctgggattacaggaatgcaccactaccaggaatgcaccactacacccagctaattttgtattttttgtggagacggggtttcgctgtgttggccaggctggtcttgaattcctgacctcaggtgatccgcccacctcaacctcccaaagtgctgggattacaggcgtgagccaccacgcccagccaataactatattctttaagacatccctgcataatactgactttccaagtcacacagttcttcccacttcatgtgaaatacccacttcatgtgaaacaacgagattctgggatttttctctcactcccctcacccttcagggaaagaagggaaaaatgaaatccaaaatctgaggagcggttatctgggtaactggtggttttccaaaaaagcctctttcttcatactatggttctaaaatgtctttaaattagagtagctctctttatcaaaaacatcaccatcaagaaggtaaggagggcctaatgatggggtgtctgggaggccttgaaaaaatccgaataacgtgagaggcagccaccacctcctaacccagcccatcgccactccctttccaagccaactgggcaccgatgagccgcctccactgcaggtggaaggggcaacgctgagtttcccgacttcgtagaacctgccagagaagcttttgtgtttcgttaaatacttggaatagctcgtttgctttctccgttgaattccctttcaaaatcctcacagagtggtctgattagtcacaatctgactgggatttttgtgagtctgggatagcgcagggttttttttaatttttgttatttttgtttatatatatattttttgagacggggtctcactctgttgcccaggctggagtgcagttgtgcaatctcggctcactgcaacctctgcctcccggattcaagcaattctcctgcctcagcctcccgagtagctgagattacgggtgcccaccaccacgcctggctaatttttgtattttttagtggagatggggttttgccatgttggccaggctggtctcaaactcttgatctcaggtgatccgcccacctcggcctctcaaagtgctgggattacaggcatgagtcaccgccccaggcccagcacaggtatttttaaatgcatgggtagcaacagaaccttccttttaaaggaagtctgaggtcaaagccactctggtcaagatgggagtgtcttgtgggcaaaacttcttggccttgctcagctcctaagacttgggatttacatgttggtgctgccaccatctcgctgtgtgatttccagcagggtgcagcctcttggggtggcatgggctcgtcgtgaagaagcacaacacacgtacctctacttgcctggggcagcagctggcacctgagggtctctgcacatgtcagcacctgctattcttactcttactggttctttttattattattttgctgcttcaaaagctatgctttcagttatttcatcctgtttctcaactctcctgctctccttgcctccctgtgtctgggaggtcaaagggcagaggaaaagagagaggccctgggggcatttgcaaaagacagcgggcaggaaacagactagggagattgttgggctagagattgagggagtggaggttaaatcatggtaaaaagggagaaagagaaaaacagaatgaatctagcaaactcatttgcctcaagatatgggagtcatagccccgaagagcccagagcaggggctgcaggcccctcctgccatccctcccaaacagtgtttcctggaagcggaggagcctgtgttgagggagacgggacaggaggcagagactacctgcaagtttcctaaggccagcctccttccccagaaaggattaagggtccaaaggaaggggagacccaaaacaatcaccgtgtctttaccccgaggtcagtcacactggagagggggccctcggggcaaagactgggtgattgttttgttcgttttttgcacagatttccgagacgtgcatagtagcaagtaaggctggagaggggagggtgagggggaatgaaaagttcttgatgatcccaggctgttttggagagagccaggatcagatttaggataacgaccggacccaaaaatgcctgtgaagctgtcacgtacaaactgctatgccctaaatgagggggaaaagggactctctgatgtcctgcttttgacattcatctccagaaccatttgttcatctctctaaatttggaatatcagtttgtgaacattgcttacaaaatcctgtcccaattctgtggccctcccggactgcagggcagtaagtcaggtctgcagattcaggtgggcctgctgtcatagccagcctgagaaagactggcgcaggggcccccaggatgcccagacctcatctgcagcccctgttcactgcccaggacccagccgtgggctccttagggatgctgggaaagacggctaagggacggaaatgaagtgtacagaccgagcagcagcaagatctgcctgcaaggctgaaataactctttcatctgattatgtttttcggctccaccttgaagttttcggcacagttcagcatgttccagaccatcaaagaccagctagagcagcggacgcggatcctgcaggccaatatccggtggcaacaggaagagctccacaagatccaggagcagctctgcctggtccaggactccaacgtccaggtgatccccttcccgggctggcctctgtccctgctgctgtgtgggaaggggtcctgccgccatttccgggcagccaggacttcctcccaagccctgtgaactgccctgccaagccccatttgcttatgaaagcatattgcagtctctgcaaaggacaaggaacaaatcccggtccccatccctgcctccaggccacacccctgatgtcctcttccctcgcccctcactctgacaggcacatctgctcactgcctccacctacgtttgcacttgtgcacttggcgttggattgccctgcatggatgcctgcctcggtcctgggtagtacctccctgcacctctataactttgctttcctagctcccagcccaggctgccatcaggaggagatggaagcagctctgttgtttctcatccaacgcaggcatccagggagatgtgggaaatgatgatatccatatcacagcctactggagactgcagagggagctgggtggctccccatttgtggtgtgccagcagggaagctctgcaaagcctagcagcagcagctctcactgtgacccccagatattagaattgtttggagaggtgttgttttgttttgttttttgttttgttttggaggaaaacctttacatattggatctcttttaataatatataatgttttacttatattagtccaggactgtgtatcttcagaagtgcctgattctgacccagcctttgattgtaaatgtaactctagctaaccttggcgtctgccctgggagcactaagcatttggagacccttagaagggacagaaagaagcagaaataacatctctgctggagcactgtccctgttgcttcccccatcaccatctacgcagaccctcccctggccacacagcttctgaagtgcagccacacctaccataggtgacaggcgggttctgtcggggcacagcgccgtgagccggtgcacgctgagattaatacacagtggtgcaggtgtctgggggcttagggagatgctcatttggccatcctgcctcgctgaggtcccagcagctccgcctggccctcaggggcactcctggtggctttctagatgctcactgtccctccccttcctgcccctgcacaggcctctcagaggtggctgctcaccttaaagagaagagccccgccctggacaggccacctccccacctgctcccctcaagacacggcgtgtgcgccttgagcaggcttcactcagacagcctgggccatgccagagccctgctgctctccccacctcctcagtgcacccttaaattgaccagaaaaaggctcggccttctcgtgaaaagaaatggagtcaccgagctgccattccaccttttaccagaataggtaaaaagtggcttttgacttacgccttcccagctggaatatttttctcactgatccagggcctgactgggagcccaatgcttgcctgactccaattactttaatggaatttttacactaacaggaagggggaaatcgagccagaaactgctaaaattgaggtaggcgtatgaacatccccctcagtgcctggagtttttctacttcctgccttttctgaattttaaaataacaggcagcaaggttatcgctttcactcctgttataacaaagtatttttcctccttgtgacctatgcctttggttaaccccaaagtacctatgccacagtgcactgagggatgttctgagccggccggcatgggaattgcaccctccggtgccttcctgccctgtgttcattcctgaggccttatctttgcagtggaattttccagagatcatggaaatccacagatagtcgagacagaggatatttcctcaaggagcctgccttgtttttttgtaagacttaaagaaatatgttccaaaatgtgatatttgttttttttaaactaaactgtgtgattcaagtgtgaagaataagcaagtagaaatgactccagcccacccccaaaagtagagggatagataaaataagaatgacaaaacactgatgattgttgaagcctaatggtgatgccaaggtttcattatattacttgtctattttgtatacttctaaaatgtcctgtaatgacaagtatttgtagaaataagcagataacactaatgaaaaatcatctgtgagtgtaggattggtttgttcttgaaaattagaagttgttggtttgttttctctgataacttttcccacttggagaacttttttttttttttatgttttctataaagttgacctcagagcccttttaagtcaccatctccttaagccacaaaattctactttattgttgataaacagaagtacggctgtgcccagcagcaaaccaggaaccagtcccccacccagtggcctttatcccaacctcagtggacttgtgatgctttacttcattgcttcaaaactttcgtcgaggctatatgtgcctgtgatgcttactatttttttttttcaaaaaaaccttgggttatgaggaagaagtcctgaagggctgttggtgtttgcacctggatggggtcatgaaaatggggctacctggacaagagctgttgtgctgaaaggcccatcgccccctccaaggctgcctcttgctctttttgagagcatgcgcgccctctgctggctgctcaaaggaatgcctagaaggacacctgtagcaatggcaaatgacgtgttcctcaactggttcatccatccatctatccatccttccttccatccagccatcatctatccatccttccatccgtccttccttccttccatccagccatcatctatccatccttccatccagccatcatctgtccatccttccatccgtccttccatccagccgccatctgtccatcctttcttctggccaccctcccttctatacatccttctgcccgtcctttcttccttccatccatcctttagtccatccatccatctgacagacaccctttatttaccaggcacgtggttaagcactgtgaggatacagaaagataaacagggcagggtttctactgtcagaggatatacatcgatgggacagagtagcacaccttgctgttacagtctgttacataaataacaccagcagacatagtttgcccttctctgagtgaaagcaccattcatatgtttattcattcatacatgcatttattccattcattcatttatcaaacagtttttatatgcccaaagaggcgaaggaggaaaaagctccttttttcattttgaatgttattatctgacattcattcagtacttactatgtctcaggtcatttatatgcattaacttcatttagtccttaataagatatatgctcttaatgtcactatttttttttaatgtcactattttttactaatgaggaaactaaggctttgaaaagttattaaaattgccgaaggccatactgctagtaaatggtagggtgggaatttgagctaagataggtctgctttaaggtaaattatactgcctctcatcaataaaggttggatttattcaaactctaatcaaaaggtaaattgtgtcctaccagaaaaacgcatggtaattgggtttgactactaggtttttgctgaagtgatgaagtataggttgccctatgtgctataaatgagtcttattttaatagggagctgggattgcatgaaacatgaatcctcaaaatgtgtaaaatgatggatacccagaaaattcttcttaatttctaaagtgacaaggagtcctcatttcaaaactgcaggcttctctgtggtgggtggggcatgagaggagtttggggaggtcccgtgggatggtagaaagatcagaacccagccccagctcagccacctgcccatctcgggcctctggtaagtggctcgaccccacccatgaaacagatgcttgagcgaactgatccgtaagtctccccagcgcgcctgcatggtgggatcctcgcctgcctctccaaacctgcgctgacactcagcagatgtcagcctgtcggtcctgtactgcatatgaggtgggactgcactgagtacaggaatggggtgaaaaacgtcagatgctgggagccagagagccttccccctaaagaactccaggctaagggcctgatggactggaacagtgtatgttgagaatcatgatagacacagtgccatctgatgtttttaatacccaagaggtacttttgtttaaaaagccagtttcaggtctgtcattaaattattattaaaattacaaaagttgtctttcttaaaactttagagtcaactgacagattccgttttatttatgaatctactaatttggtctaaaaagagcaatgctctaactagatttttatttatgttcaattagttgataggttgattgtgaataatcaacattatctaccaaaactattcatttacacatttaatttatctgaatctttcaagcattttatgtacctaacaaggcagacttataaagctaagaagtaaaatctttctaagcacctaaacaactgttttatttatttattcatttttaagacagagtctcaccctgttgcccaggctggagcgcagtggcacgatcttggctcactgcaacctccgcctcccaggttcaagcaattcccctgcctcagcctcccaaataactgggattacaggcgtgcgccaccatgcccagctaatttttgtatttttagtagagacagggtttcaccatattggttaggctggtctcaagctcctggcctcaagcgatctgcccgccttggcctcccaaagtgctgtaatacaggcgttagacacagcgcccagcgtaaacaactgttttaaatcaaatacaccaaacttatttgaactaaatcaggattctcaagaacacctcaaattctcttaaatctttcaaattaaaaccaccaagctaatatcccatggccttttaaatgtctctgagacaccttaggtaacaaaacacagagatgatcatgatgattacaaaacttgaacataattttaaagtgcatggacttaatgttatgtgatcatatccatgttattggcctgcctgggtatgtggttccttaattaatgacagatctgccatctcagctgagagcactggattgaaaattctcaacagtaatgtgggtacagacacgagtcactggtcagagattcaagggcaaacacagagcctggtcctactgcgagggcaatgtggcccatgccacaggtgagccatccctctgcccctatatcatgaggcaatattatcatgactgcatcatgcattccactcaccaggtatttctcccttctaggaagaagctggtaagccaacctcgactctaaacaagtacatcacattatttagagaacatctgggtctaaacagctttcacattgttaggcctcagtcacttgcctgtaaccttcatgaaggcagagagagtgtctctccagcccatggctctgtggccagtgcctgacactgagcttggggcatcacaggtgctccatgtccaccagtggagtaaatgaactatttctaggcagctcagagcaagaaagttcttactggcacagggaatgcaaaggaggtgcacactggtgaggtacccatgaccccaacttcacaggcatttctattctgctcccagatgttcctgcagcagccagctgtatccctgagcttcagcagcacccagcgacctgaggctcagcagcagctacagcaaaggtcagctgcagtgactcagccccagctcggggcgggcccccaacttccagggcagatctcctctgcccaggtcacaagccagcacctgctcagagaatcaagtgtgatatcaacccaggtaaatgtgctccttgccagcttcactccttgcctctagagcagacaccctcttgcagtttgggacatacttgattcctgcagcctacgtgaactgaggcctactgccctgttccgttatggactgagggtagatttgggagtgagccttcttttccttcttctgttaaagtcactttgaaaccccaagttgtattggcttccttctgtgttttataaatgtccacctcagtcccttgctctcgtgcttaaagatatcactcggctgaaatgttcacctttgatgctgacttagggttggaggcagatatggccatcccagagacccactggcagctgaatgtcccaacactcaacgtccatggtccccgccatctactctggttttaaccattacccacatgagcagccactgctgttcactgtcccttgccccaggtgccccctgctcctccaggcgccccctgctcctccaggcccccactgctcctccaggtctccctgctcctccaggcccccattgctcctccaggtctccctgctcctccaggtccccctgctcctccaggcccccactgctcctccaggcctctctgctcctccaggcgccccctgcccctccaggcccccactgttcctccaggtccccctgctcctccaggcctccctgttcctccaggcgccccctgctcctccaggcccccactgctcctccaggccccccagactctttgccaaacccttgtagccatttccacctattccaagccaccagtgaccttgcaattggacaaaatcgccagcagataaatggcactcaaatggaatggaattcagaagtctggagcagggcttctggaggataacagatgggaaggcagcctttcctccagcctcacattcccatgccctcgtggctttggtaaagtcagctgagctcctggaattcaccaagacccaggggaacaatgatgagcaagagttgtcctgggcctcgaggagcctgtagtccagtagagaatctgggaacttagataacctgcagtacaatacagataaacacacatatggaagtgtttaggccatctttcttcaaatgtaagggttttgcttgaaaatacagccttttgatttaaaaggtcatcagaaaaataggtgagaagagctaagaaaattttggaaaagagaaaactgaggaaggatttatactatctgatattggaaaattttgtaaaaactaagaatgagagcactgtgttatcggatgaatggacaatcagtgaaatagacagaaaacccaaagcaggtgcaagcccacttcctcactcatttattatttcactcagctccctgcgtgccaggcactaaattctgagcactgagggaaagcagtgaacaaaaaagaaaaaagaatttctgttccaagtgaggagagagacgaacatgtgaaaattatagtatgtgcaatggtacaggaatgctggtgagggccaggaatggctggaggtgtaaagaggtagccaggtaaggccttttgaagaagataatatttgagtcaagacctgagggggtgaaagaatgagccatgtcaatgtcaggggaagagcattctacagagcagtcagctcgtgcaaaggccctagggcaggagtaggcctggtgagttggagaaacagccaggagggccatgtgtctgcagtagaatttgaagcagaaagtagttcagttcaaggcacatttgctacttgcctgcctggagtccggcactgtcctaggcccaagggattcaaatacaatccaatggggaagacagtcacagatcaaagtaattcagtagttgggaggttctgatttagaggaaaggcaagggtaggtagaaggaggagacactgggaggtttcctggagagatggcccagggttgagtccaagtcttacctttctcattgaaatgatgctccagggtccaaagccaatgagaagctcacagctaatgcagagcagcggccgctctggaagcagcctagtgtccccgttcagcagcgccacagctgcgctcccgccaagtctgaatctgaccacacctgcttccacctcccaggatgccagccagtgccagcccagcccagacttcagccatgatcggcagctcaggtacgagactgcccttgtttaaaggataacccaggcatcattttaccccattcatttcagctctactttctgctttagacggaggcagagttcagacagattctaaagtgtccacagttgatctcagctaaggaagcagaggacagggcttgggatcctgaggtccaggggaggttacccgctgcgtccatcatcctcagagaatgaagccaggagagtggggattagagtcaaccataaagggtccagccaggctgagcaagtgctgccacgaccagtgggtctgtggttcaggtgctgatcagtttcctatttccccacctctgcttaaaggctgttgctgagccagcccatccagcccatgatgcccgggtcctgtgacgcaaggcagccctcggaagtcagcaggacgggacggcaagtcaagtacgtggaccctggcgggaggcaggaggcaagcgctggtggaatggttccaggctggccagactcacccgcctgggccagcagcactcacatgagccttgcgctaaaggcaaggtctgagtgtgcccacagctgtgaaggggacgctgcccctcagcttttcttctaccgtgtcccaattaagcagaaaaaactcagcgctccatgcttacagcagcactgaatgaaacaattcacaccccaccgtttgccatcatcttccgacttccttacacctgtaaagccctctaaagccctcacccctggagacatcccccttcccaaggaccctcccccaggctccagctgacatgccgcaggcacacttggtgctccgtgcttctggcaccgtgctcgggcccgtctctcccagacaagcagccccctctctgccttccccagcctcctctccactagcaccggtaggaccagaagcagctttactcagctacttaattactagggacaacggttactggagacacggggaatagtttaaaagctgctggaaaacagtttctagcccttgggaatgaggcagaaatagagctatcacacagacatctccttcatgttaacactggttgactttgtgtccagaactaaccaggacagtgctagccgatcaggcctgggatgccctcatgtagaagcctcgcaggcacccccaggcccctctccctagaagtccttcttctgtgccctccttcagccaggacagagagtaacggcagatggttactgcctttctgagggtcagggtctgtatgttcattatttaattttatcccgataaaaaccctagggtgtaggcacatgctcggtctttttttgtttgtttgtttgttttttaaaccagtgaagaggctgggctttaaaggggttagattacattctcgaaggccacacagtgcagatggtggggctggaggccagctaactccaggccacgggccccttgggctccctgaatcttcaaagtccaccttgttggccctgtctggggtctccctatgcctcaggataactttctaggcagcctctgcccctgagactttctggccctccctttggtcacaggagggtaaggagggacctgcaggttgtggggagccatctgtaaagttccgttcatgtctatcattaggtgggaggaagtgggctggttttgcttctggattttacctgttcttcctaaatgatccaaataagtggaaataggctgggcgcagtggctcatgcctgtaatcccaacactttgggaggccaaggcgggcggatcacctgaggtcagaagttcaagaccagtctgaccaacatggtgaaacccccatctctactaaaaatacaaaaattagccgggtgtggtggcacgtgcctgtaatcccagctactcaggaggctgaggcaggagaatcacttgaacttcagtgctctgttggtgggaactgtccagtgctgcagccactgtgttaaatgtcggctctgtgtccccaccaaaatctcttgttgaattgtaatccctagtgttggaggtgtggcctggtgggaggtgattgatcatgggtggggacttcccccttgctattcttgtgatagagttctctttttgagaactgtttgtttaaaagtgtgtagcccctccccctcgttctcgatctcctcccggccatgtgaagttacttcctggttttttgataatcaccattgtaatgagtgtgaagggacatctcattttggttttgatctgctttgccctaatggaatggctactgatgctgagtatgttttcatgtgtgtgttggccatttccaggttctctttggagaaatgtcagccccaatgcccattttttgattgggttgtgtgggtgtcttgttgtggagttgtaggcattctttatatattctgttatcggtctcttattagatatgtgatgtgcaaatatcttcccctactctgtgggctgccttttccctctgttgatagtgttgatagtgtcttttgatggacaaaagtttcttttttttttttgctttgagacggagtctcactctgtcgcccaggctggagtgcagtggtgtgatctcggctcactacagtctccacctcccgggttcaagctattctcctgcctcagcctcccaagtagctgggactacaggtgcccaacatgacacctggctaatttttatttatatttttagtagagacgggggtttcaccatattggccaggctgatctcgatctcctgaccttgtgatccgcctgcctcggcctcccaaagtgctgggattacaggcatgagccaccgcgcctggccaaaagtttcttatgaagtccaacttatttgttttttctttgttgctcgtgcttttggtgtcgtatcaatactgctttcttaaaggacctgttttctccttcccacgtgaaacaggtacgcccagagccagaccgtgtttcaaaatccagacgcacaccccgccaacagcagcagcgccccgatgcccgtcctgctgatggggcaggcggtgctccaccccagcttccctgcctcccaaccatcgcccctgcagcctgcacaggcccggcagcagccaccgcagcactacctgcaggtgggtgccacggcccagggggcccccgtgcaggcctgggagccgggccacgctccacacccgaagtctcagagatattttattcccttgctttcaaggttgttctatccctagtatagaagtaagccccagaaagattgttatttgattgtttttcatgcttaaagtttatgaagtctatgtctacagagtacatgaaattacgagtcggctattatgccttatgtggttatgtgctaaaaaggttcttttttaaaaaagtagtttctactcaaggatttgcatcttgatatgttcacagtttttagagcaaaagtcgaaaaacattgatgactatgttggacttttcagtgtgtttataaagtcctatataaacataaagttaaatcacatttagttaaagatccattaacctgccttcataaatacagtgatgtgtgaaattgggcttgccaggaaaatttggagctcatttacatgtggtcactacttcgaaggcaaaaattacttcaagcaagtgccaagtatgtcaaaagcagggagggtgagagccactggtccgcaggttcacgtgggagccacacgtctgcgtctgccaagctccagaagggcctggccttccctcacccatgtgcagggtgcccctcttcaccccagcccttccctgtcctgggggggcttcctccctggcctgcagccccacctgcacctgcaaagccatggagaatgagcagtagctgagacctcttgagtactgtagatagtgatgaagatagctgtccttgaagttctagaacgtaatttaattccagtgccgctaagccatctgtgctataattttcagatctccctgaccccacacatagtgggagtcaactcagactttggctttgcagatcttgtcagttctcgagacccagaagtgattttggatgggaaatgagcaacagacaagtttgcatgcacctgttgcagacaagatgcaggctatgaatacagagagcgcttcggcccactcactgcccttaggggcttggggtggggtgcagagaggtgggttagcacagaatgcagtcaggctcggatttgggaacagtgggagtgctgtggtggggaagcctttgtggaggaagggacttgaggagagggagggctcagaaggcacccactgcagagtctgatgtccaggaaatgcccgaaatgtgggtgagggtgaagataaagggacagtgttccagccagacagcctgagcaaaagttcagggcagctgtgcctgggcagctttgagagcaggggggtgctgggttacttgcaggaggagatttcatggaagggaatagtgggtgataagactgaagtttccaaagtcaggctttggtcagtcaaagcttctaaacttccaatcaagatgctcctagtaggtgctggtgaatctggaggtagctacgggatcagggaccagcagtgaaaagtgtacaaactgtatgtgtgtttggattctgccctgtcaactacctgcatgtggcctcaggttccatcatccaaaaacattgtggctacatgtagatcatgtgcacgtgtttacgaaaccattccccatagccatagccacaggcctcagtcgattgggccagaaggtgcccccactattggcggagaacttagcttcagaattcaccctaaggttcccttagtccccatccccaccacacccccaggtcttgccagagccacctctccccacatgaccccccaagaaagacagccctgtagtctaactcaacctgcagcatgccccgcactgccttgtaagacagttgaggagcggacatcagaaccacctctgaagccctttgttcttttttttctaggtacaggcaccaacctctttgcacagtgagcagcaggactcgctacttctctccacctactcacaacagccagggaccctgggctacccccaaccacccccagcacagccccagcccctacgtcctccccgaagggtcagcagtctgtctgagtcgtcaggcctccagcagccgccccgataatgccccggcactgaagtcgggacacaatcagctttaaccaatggatgaggggggtggccacaggagatggggagaggagtctgaactaaacccctggcttttgtgcacactgcatacgtttcagaactcctggatggtaaccatctctggagtgcagcgcttgctgcagtggaaatgatcaggaatactgaccgtgtttctcttgcctccgaggttcttgggcacactctatagccatactggacaggaaccaggtgccccgtgtaggcatcgtcggtcggtttgccgtcagagatggcgcatctcgctgcatcccccgagagtacaccggttgctctagccacctgcggcccgcccatctgcgctagctggccttcacgctcttgatcgtctttcctttgtattggagaaggactgggtcagagatctgttggagagagagaataaagagattatttttcattatttttaaatggttgtttttgttttaatttgcacagctacacagaggaaataacttaggtactttctgttttttttaaaaaaataataaggtctcatggcttcattcagagaccacagtaacaacagcagcccaccaatcagagaagctggttgttattaaccaagctacagattcacactttctggcctaaaccctaatgggatgaggcttttcaccccaggccatgctggtggtgattttttagcccctaaataaaacactggactatttcctgtttacttcattgattgcaactacaaaggtggactcaaagcaaagcacaatcatgccagccaacattccagaattctgctgagaactccaagtctgtgaggggagaggttttacaagccagacaggcctgggggactgcagtccccaaggagaccctgccacatgctggccctttgagtgagaatgctgcatctttctacatatcttcatgagaatactgagaattggattttccttttcaaaatgcactttgctttttttgtatgttttgttatgttgagatgtttctaaagaaaagattttatgtaattataagatgaagcgtagtgaattgtacagctgttgtaataatgacctatttctatataaaataaaattgtatggcttatgtgtaaattattttgtatctgagataccagttccttttcccaaatataaaagtataaaagttttcttgtgtttttctgtgagtgaaaattttgtaataaattaacaaatttgtacaatttcctctgtcccttgttatacatccctgcatacatcttttcaccagtaattctttttttctaatttcaagatgtttgaaggataatcaaagatacggaaaagatgaaagcaagccatcagctttttgagctgcaatatgtgcatcggcctatcaggttctgatctttgtgttaaagtttgtgcccgaaaaacaaatggtttactgtagaagtgacagcaaaacaaaacagaaaaagtttctggaaacatctcaatcttttttttgtttgtttgttttgagacagcgtctctctctctcttgcccagcctggagtgcagtggcacaatctcggctcaatgtaaactgtgcctcctggttcaagtgattctcctgcctcagcctcccgagtaactgggattacaggcacccaccaccataccccactaatttttgtgtttttagtagagacggggtttcgccatattggccaggctggtctcgaactcctgacctcaagtgatcagcccacctcggcctgccaaagtgctaggattacaggtgtgagccaccacacccagccaacatctcagtcttgacacaggtaaaatccatggaggtgaccaagacattctccaccaaagcattcatttatagcccatcattaaactcagcctggaattacatggggtttcgccaccaacacttagatatcagtgatgtgggcagcgtatgtgtgtctccatataagatgtgtgcacatatgccacgttgagggtgggggcatagccgcagcatctagaagatttctgccaactacagacagccaccccatcatgaggcttcatgggctgaaggagggtaccctggagtactgtggttgagaaccactgcaacggcaatgccccttccaaaagcattggcccaagagagcaaagttcctttccctgctgcattgctatggctctctgctcctactcctcccatgtagaatggggatggctcttcccagttctatgactaggatcagttttggatggcatgagagggtgccgtataaatacatccaaaaagttttattactcacacaattgttctattcctgagaaaaaggtaagtgaaaatattttgcacgtactaaaacactaactctttaaaggaaccagaaatgaacccccttcttaaaaatgctttgtgaaactggattaactatttttaaatgttttataaattcaaaggtttctagatctgatttgcctgtaatagaatttgtaatttaatttgctgtcagcatttttttaagcagaacaagatttttaatggacagcatatttattgtcctaggattttctagctggaagtcattaaaaaagggcagagtgtgccttgctactaatttgatttagctttgcttaaatcttacacttgttcagaatttggataaactcagaaaacgcgtgtaatatttctttaaacccacatgcgtcatgggaagtttaatccctaaacttttgattcattaaagtttgctcattaaaaggctattttgcaaccctgtcctatttccagaaaaaccatgacctttctgtttgtaaaactataaagtcttggctcatgtgaaatgactgaaacgcgaacccaagtacactaagtttatgatcttttcaactaactcagtttactgtctctaattcaactaaaattcattacattaattttaaaatgttgtttgtgcatgcgacatggggaactagccaactgttctaagccatgacattttacactcttgtctaaattatctggtaaaatttgttttggtacaagactgctttggtttctctctttacttagtgtaggtacagcctgaaggtctccaagtctgccattaatgtcccagataaataactaatttggatcctctagagatacctgttagcagctttttgggcagacatgcattaatttcacactatgcatacaaacagctttatttttctggcaaaaaaagctcactggaaacacaaaacaactctcgtaggatttttccctaaccacacttaggcacatctatgatattgattcctttttaaaattacaattatcttttttatatttcgtgttttattttaagcatgaagttaggaactcatggccttttatggactcaacttttctaattgaccattgttatttatttcatgctcaaattggtacaacccggccagtgagagccagctcctgtgtttggctcttttctctttttagcattgcccatcagaaatcagattccagatttccttctgggaacaacacaatcaaggcccatactgatttatttatttattttatttttcctctctcaaagcatgcaggcgactaccctccaaggagtcctgattccttttaattaaaaaaaagagattaaaatctggacacctagagtaagactaagagctggtattgggtcaagcgctgcctctgttgctgttattgggtcatcctgttgtgatggagctgaaaacattttcagtcatgaaatcacattgatttctgcaatgtaatatatattataccgtagtctacttttctaatgtgattttgttcagcactttctcctaaactgacattccatatgaagtcagttatgaactgttgattttaatttcaaatacttcttgtgccattcctctcctttctgtcacattagttgctgcctcatttgggccccatttaggctgggtcacagaaacagcctccacactgacctcccaggcctggtctacccatactacctctttagcacctcttcaccaccacgcctctttccttgtaaaaatctttcggtggcgcttcttgggaagtcccattggaccttcctggagctcagtccaggatgaaactgccaaggaggactcctttagccccttaggtttgttgcccctaaagctggtggacaggaatgcaacctgtctactttcttgctgccccgacagggaaacattcagatcttgtttcattttatggattctctgctcatcagtaaaagtaaaaagacgtgagtgattagcccagctaacaaacaccagagagttacaaagttcctattatatggttctggtctcttccaggcccagtagtcactggcctggtccctggggcgtgggagggaaacagaagctggaagagtctgcagagccccaggcaggcaaatgattttcagtcctcaaacctaacagtctttattatatgtctgttcaacctttatgtaaggcaggagagttgacatcttagggggatgttttgtagattcccactggaaggatctatttatttcaacaagtggtaggatctactcacatttcgtcagttatacggaaacttgagtcagctggcaccagacttctttctgatttattacagtaacacttttactacctctaatggatggtaccctagaaagctgtcccttaatccctctctaggtgctgggagccagatagaaggggcaagatcacatcttcagagtgtgattgcagggagtcaggatcagaacaatgatcccaaaagggccatggggtatgaaaggcctgaggcaggctttagggtgcctgagcatgaggaagaggaggcagaaaggagatgagagcaagcatcatttggttgaaacaaattgtgccagcccctcttcttctttgttaacagaaccccacttctgtgcattaaaagcaacgtgtctatcttgtaatcctagcactttgggaggccgaggcgggcggatcacgaggtcaggagatcaagaccatcctggctaacacggtgaaaccctgtctctactaaaaatacaaaaaattagccgggtgtagtggcgggcgcctgtagtcccagctactcaggaggctgaggcagaagaatggcgtgaactcggcaggcggagcttgcagtgagccgagatcgcgccactgcactccagcctgggcaacagagcgagactccgtctcaaaaaacaacaacaacaacaaaagcaatgtgtttagcccaggccacaaaatacacaacccatcattaggccaaggtaatcgtgacaatcccatttgcttttggcaggcatgtgctctcccagcctaactgaaatggagtccctagtcctaaccaatgacaggcagaaatctactggaggtttctggaaaggcctttggagtctgataagagacatggggggaggcttccttgtccaccaccatctcttgcctttgaggactgctgggatacctagaagtgcaacatctaccctgatacaggatgcaaagattcctcatgagatcagagtccctgttccagccctgaaattgcctgcctccagtctcgtctgtgaggtcttgaaacatgtccattgctgaaaaccctgttagtaggttaggggtgacttggtccgggcattttcccattcaccaaagtgccaggcattaagtgggccctttcaacttggaacatcaagctccttcgttctgggaaatttccttaaattcaaggtaccatcgtcatgaaatttctgaactttaaagagaagatcctaaaatctttcagagagaaaaaaatgacgcatcacttctcaccacactgaaaaactgaagacaatgaagcctgccttcaaaatgctggggagaaattcttttcaatctagaattccatacaagccagaatttaaatttgagggttgaataaatactcaggtatttgagggctcataaactttttagctagtgtactcatcttaagaaaccactaaaaatggtgtgctcctgtgaaagaagggagttcgacaagaaaaaggaagacatgggtccatagatccaactgtctccgaatctctagactggtgacacgcagttcccagttctctggggacctcctcagatctccctgtcgtgtcatctcacatctgtcatctctcaggtcatatccaacacactgggccacccacgcacagggacgacgcgacagccctgtggctccaccgcacaggacagccacgactggcaatcctgtgccggccctgctcgacgcaagcacctccagcgccgggttgcgtcttagtgaccctgggaccgccagccaggcaccgcgcccgacgcaggctcagtcagtgttggtcggatgcatgaatgaatgggaaaaacgaagtctctctctccctggccctgctcccatacatctgtaggcctaggtcttggttttatccgaagacttagagaagggacgcaagttccttcgcggagccagaaggaatccgtcgagaagcgggacctcaagctcgcggcccaaaagcgcggccccgccacgacgcctgctagctggccccacttcggcgcgcgccgcttacatcatagctcgcctctccccttccctagccacacccccttgcctggcgacccggaagttgtacttgcaactgcggctttccttctcccacaatccttcgcgctcttcctttccaacttggacgctgcagagtgagtatgggtggcggagtctgggctcctggaatccagccccatcctcctttgggattgtgctaactgggaccgcaaaatctctcccgagccagcccggggctccggttgtggggagatgggaatacaccctgcttttaaaggctcccagagcctgaggaagaaagtgaccaggcttaggggagccggagcggcagggatttccgggtcggaggcatctgaggggcgcaggggcgcgggtgcgtgggccactgggtgaccgacttagcctggccagactctcagcacctggaagcgccccgagagtgacagcgtgaggctgggagggaggacttggcttgagcttgttaaactctgctctgagcctccttgtcgcctgcatttagatggctcccgcaaagaagggtggcgagaagaaaaagggccgttctgccatcaacgaagtggtaacccgagaatacaccatcaacattcacaagcgcatccatggagtgtgagtatccctgtagccgccctgggtctcgaactcacgcgtctggttgttaccgagagatgtgccgaatcacctccaccccaatcttttcctcttgtggccttccctgtttcattcattggcaatttaacaaatcctgtgggctctaccctccgaatacattcacagtctgaccagctgcattggtctttctgaccgcccccattattctttcttagccgaatgcggacagcagcagctccctactcctgttcccttccctacccaaacatgcgtggtctattctcagatcctccatcggccttctatcttaggttagaaatcaagagttcttgccatgatcccacattggctgacccgcttaatcataccgggcatgcttttgtttcaaagtagctactttgttgaatttttaccctttttttccctatgcctgaatgttttttccacaaataaatgcttcgttgccttcagactttgagtccaatatcaccctggccatctgttttgttttgttttgtttgagacggagtcttgctctgtctccagcctggaatgcagtggcgcgctctcggctcactgcaacctccgcctcccgagtagctgggattaccggaccccgccaccacacctggcccaccttggccgtcttatagaaacttgcagtccccttccctaatgctttattttccctggtttgtctttctctgtagtactagataccatctgatgtactcaataggttgcttacataagctgtgtgaagaacaagggattgccagctgctgttatttctagtaccgtttacttctggatgttttaagtatttaagtgaagtgagcttgcttgatgggttcatagcgctaactactgccattcatcatactcaagaagcgacctgcctgcacacttcaggcccctgctctttaagcatagatgaagtcaatagcattgaatgatctgttccaaaaacatgtcctgtcttaagacatgacatttaatcaaatttagtattttgattgaggacttcagaaagtggattatgcatcttcttgtcctaagtgttatgctaattgctgggcattgcacactggtgggaaaaaaggattgttactgcctagtttaagggttggtttaggctggttttaggaggacataccatctacagtaagtcttcactgagctttaagcacactggcctactgtatgctgtaaaaacttggttttgttacataagacattgcttaaagtcagtttccaggagcctatcatcgacattgaggatttctcacatgtacctaatttagttttgtgctcctttaatttgttcacttatgtttgaatcgtaggggcttcaagaagcgtgcacctcgggcactcaaagagattcggaaatttgccatgaaggagatgggaactccagatgtgcgcattgacaccaggctcaacaaagctgtctgggccaaaggaataaggtgctaaagttatctgtattcgaaggtgaacttttgcaatgacaccagcttcacttaaccctgcaagagcccatatcagttcagtaatttggttaatgcatgtggaagtataaaaaaaaaaatactgtgaccgtgacttagggtgtgtagtatctgcagggaagccccttaatttagtggcttatgaactgagacccaagggaaggagccagcagtgtagggtgggaaagagcattgcagagagaggaagcttggcaggatctgggagcggggtggtgaacgcaggtaaagtggaataaatcactgtgagcccagtggaggagggaggggtgagggtcgctctagacatcatggcaagtccaccaggagagaagtggttcttggcctgcggcagttttacctgtccttcccggggttgtggcgggggtggggggcagtgttttttgtcactactgagggatactgtgggccagggactactaaacatcctacaactcatggggctgctccctcaacaaaaaattgcctagctcagatgttagttctcatgttgggggaccctgctctaaagtggaaccagaaagcaggggaggcttgtgctgtaaaggacgtcatgaggtgccagaacagaagtggagtgaggggcagctagaggaatgatgacagtgtggactagttgattctggaaacgggttgggggaggactgtctgcatctgtgtggtatttaaaccttaggattaagtgagatgaacaagacagggacctgagacctagctcttctgtgggtggacattgaagggtgcagcaggagaggtgtcctccgatgcctgccttgggataagaggaatgggattacaggagccaagagaagtcctgagtttataggaatcggggcctagaacaatacccggcatcgatagaggaaagagaatcagctgtgatgctacggagagggtaagacaggacaaggggattgcatgtggaagatagagaaatagagtatgcgcctgtggcagagtttttaacactgttttttgttcgttttgagatggagttaatgttgcccaggctggagcgcaatggcgtagtctcagctcactgcaacctccacctcctgggttccagctattttcctgcctcagcctcccaagtagctgggattacaggcagccgccaccacgcctggctcttagttttgcatttttagtagagaggggttttaccatgttggccagggtgatctcgaactcctgacctcagatgatgcacccacctcagcctcccaaagtgctggggttacaggggcaagccaccatgccgtttcttcatattttaatgtaacagaaaaatcacgtaacaaagtttctggtgatagacaaaagactaacacatttggaccatttggacccagatatct

SEQ ID NO: 613 - DNA, 2695 bp, Homo sapiens
gtttgccgcgcgagcagccggcctctcgcaggagccgagggacccgcgcggctgcggcccaggagcggcggccgcggagcccggagaccccgcagccgcggcggcggcggcggcggcggcagcagctagagcagcgcctcccgccgccgcccgggaggagctcgccgcgcccgctcgccgcctcgtctcccagcggcggcgggaggcgcgtctccccggcccagtccgcgcccggccccgcggggccgctccggcccgctccgaggaaaaactgcatagaaaatctaatggatgaagatgagaaagacagagccaagagagcttctcgaaacaagtctgagaagaagcgtcgggaccagttcaatgttctcatcaaagagctcagttccatgctccctggcaacacgcggaaaatggacaaaaccaccgtgttggaaaaggtcatcggatttttgcagaaacacaatgaagtctcagcgcaaacggaaatctgtgacattcagcaagactggaagccttcattcctcagtaatgaagaattcacccagctgatgttggaggcattagatggcttcattatcgcagtgacaacagacggcagcatcatctatgtctctgacagtatcacgcctctccttgggcatttaccgtcggatgtcatggatcagaatttgttaaatttcctcccagaacaagaacattcagaagtttataaaatcctttcttcccatatgcttgtgacggattccccctccccagaatacttaaaatctgacagcgatttagagttttattgccatcttctcagaggcagcttgaacccaaaggaatttccaacttatgaatacataaaatttgtaggaaattttcgctcttacaacaatgtgcctagcccctcctgtaatggttttgacaacaccctttcaagaccttgccgggtgccactaggaaaggaggtttgcttcattgccaccgttcgtctggcaacaccacaattcttaaaggcaatgatgcagtttggcaaagggaagtcgtgttgctaccggtttctgaccaaaggtcagcagtggatctggctgcagactcactactacatcacctaccatcagtggaactccaagcccgagttcatcgtgtgcacacactcggtggtcagttacgcagatgtccgggtggaaaggaggcaggagctggctctggaagacccgccatccgaggccctccactcctcagcactaaaggacaagggctcaagcctggaacctcggcagcactttaacgcactcgacgtgggtgcctcgggccttaataccagtcattcgccatcggcgtcctcaagaagttcccacaaatcctcgcacacagccatgtcagaacccacctccactcccaccaagctgatggcagaggccagcaccccggctttgccaagatcagccaccctgccccaagagttacctgtccccgggctcagccaggcagccaccatgccggcccctctgccttccccatcgtcctgcgacctcacacagcagctcctgcctcagaccgttctgcagagcacgcccgctcccatggcacagttttcggcacagttcagcatgttccagaccatcaaagaccagctagagcagcggacgcggatcctgcaggccaatatccggtggcaacaggaagagctccacaagatccaggagcagctctgcctggtccaggactccaacgtccagatgttcctgcagcagccagctgtatccctgagcttcagcagcacccagcgacctgaggctcagcagcagctacagcaaaggtcagctgcagtgactcagccccagctcggggcgggcccccaacttccagggcagatctcctctgcccaggtcacaagccagcacctgctcagagaatcaagtgtgatatcaacccagggtccaaagccaatgagaagctcacagctaatgcagagcagcggccgctctggaagcagcctagtgtccccgttcagcagcgccacagctgcgctcccgccaagtctgaatctgaccacacctgcttccacctcccaggatgccagccagtgccagcccagcccagacttcagccatgatcggcagctcaggctgttgctgagccagcccatccagcccatgatgcccgggtcctgtgacgcaaggcagccctcggaagtcagcaggacgggacggcaagtcaagtacgcccagagccagaccgtgtttcaaaatccagacgcacaccccgccaacagcagcagcgccccgatgcccgtcctgctgatggggcaggcggtgctccaccccagcttccctgcctcccaaccatcgcccctgcagcctgcacaggcccggcagcagccaccgcagcactacctgcaggtacaggcaccaacctctttgcacagtgagcagcaggactcgctacttctctccacctactcacaacagccagggaccctgggctacccccaaccacccccagcacagccccagcccctacgtcctccccgaagggtcagcagtctgtctgagtcgtcaggcctccagcagccgccccgataatgccccggcactgaagtcgggacacaatcagctttaaccaatggatgaggggggtggccacaggagatggggagaggagtctgaactaaacccctggcttttgtgcacactgcatacgt

SEQ ID NO: 614 - protein, 760 aa, Homo sapiens
MDEDEKDRAKRASRNKSEKKRRDQFNVLIKELSSMLPGNTRKMDKTTVLEKVIGFLQKHNEVSAQTEICDIQQDWKPSFLSNEEFTQLMLEALDGFIIAVTTDGSIIYVSDSITPLLGHLPSDVMDQNLLNFLPEQEHSEVYKILSSHMLVTDSPSPEYLKSDSDLEFYCHLLRGSLNPKEFPTYEYIKFVGNFRSYNNVPSPSCNGFDNTLSRPCRVPLGKEVCFIATVRLATPQFLKAMMQFGKGKSCCYRFLTKGQQWIWLQTHYYITYHQWNSKPEFIVCTHSVVSYADVRVERRQELALEDPPSEALHSSALKDKGSSLEPRQHFNALDVGASQTSHSPSASSRSSHKSSHTAMSEPTSTPTKLMAEASTPALPRSATLPQELPVPGLSQAATMPAPLPSPSSCDLTQQLLPQTVLQSTPAPMAQFSAQFSMFQTIKDQLEQRTRILQANIRWQQEELHKIQEQLCLVQDSNVQMFLQQPAVSLSFSSTQRPEAQQQLQQRSAAVTQPQLGAGPQLPGQISSAQVTSQHLLRESSVISTQGPKPMRSSQLMQSSGRSGSSLVSPFSSATAALPPSLNLTTPASTSQDASQCQPSPDFSHDRQLRLLLSQPIQPMMPGSCDARQPSEVSRTGRQVKYAQSQTVFQNPDAHPANSSSAPMPVLLMGQAVLHPSFPASQPSPLQPAQARQQPPQHYLQVQAPTSLHSEQQDSLLLSTYSQQPGTLGYPQPPPAQPQPLRPPRRVSSLSESSGLQQPPR

SEQ ID NO: 615 - DNA, 26593 bp, Mus musculus
  misc_feature (1)...(26593): n = A,T,C or G
agtcaactggtctggaatgtagtctgagtattaggattttttcccccttccttctcttcttctatacttcaggattaaaaaaaaaaaaaaaaaaaaaaaaagcaaaaaacaaaaaactctgtaggcaattggcagacagggtagagacctatggcctctgagaaagaacatgacgccccctctatagccgtgggcagcaagacacagagacactaattgtgtggcctagggtcacagagctagtgaatcatggagccagattagaacacagaaagtgtgacttcaaagtatgatggggagtggtggggggtatcaattgatctcctcaattcccctagtgacggagaagaagccttggggctgtggggcagctctgttctgagacagactcaggcccctccagcatgggatatttttaactgagaagctggttcttgcaaacatcctgcagcaacttaaacactgagcaaattgtttaggagtggctgggccctttctccgctgaggtagccctggagccagtcagggggtccaaggcaagctttgaagacagcgttaggggtgggaggtgtgcgtgtgtgtgtgtggctccgagggcatatgactcaaaaacacgagaggagcaaattcggatgggtccagattcctcctccttcttccctcagacacaaagattacttcatccaacccagcagccttcctccctgctcccagccggggaaagtttatcgctctattcattcactacttttggcccaaatatatcagcaagctttcagatgccaaattggaagtgtgcctgcctttaaattgtaaaaataaaaacacatggtcctgaaagtggcgatctcacttatagaaaattcctcaaaaaatggcctacaaggaagccaagcacagtgtgtaatcccagcacttaggagatggatgtaagaggatcaggagtgcaaggccatctccagttacatagtgagttcaaaactagcctaggctacatgaaactgtcagagaaagggcagggggtggggagggggaaagaagagaggaaaagagggagacacatacatacactttcacacacacacacacacacacacacacacacacacacagagacactgactcatagggatgatgaagccacaaggatattcattgtaacattgcttacacacacacacacacacacacacacacacacacacacacacacacacacacacacacaaggactgactcatagggatgaagacagccaaactggatgctgagatgcaaaatacgaccaagacgcattgcttgatgggaagagaatggaagttgtaaaacaacatgtacactcagccttaggcaggtgtcctttatctcagcagaggggctgggaggtagggggtggggccagaacagctctgtgggtcccaggtctacaagaactacatcgtgaaattaatacagtcttgcaatgatagtctggggggaggggggcggggtctggctcaggtttgtttactttgccagttaaagtattaagaggcaggaaaaccccgggcagtggcatatgcctttaatcccaggaggcagaggcaggaggatttctgagttcgaggccagcctggtctacagagtgagttccaggacagccagggctacacagagaaaccctgtcttgaaaaaccaaccaaccaaacaaacaaaaacaaaaaagcacctcctcaaaatgtcctgtacaaaataatataatataaaatgaaatcacgttgaggtggatagaaataatttggaattctagatctgctacagtataaccagaacttcccagaggctgagccccaattaatagtaaattaagctagttttgccagaatgggacggtgggactgtgtcctcagaatgacccagtgggagacagccacaccagcagtggaggagacccgggtggacattgagctctttgggaaattgaacagttatgacgcgcagatccaccatccttctcttcaggattatattgccctggaaaagtccctgccccacacaggagcgcggtatgtaaatcacagagccccatcccggagcacctcccttactccgtgctgatacacgaagctcgtgaccgttcgcatagtcaagcatgcctttgagatcacctacttgctcactggtaaaaattcctctgcgggtactggtgactgccaccgtccacagtgggcccccggggacgcctcaacaggcattgcatgagccgggacaggagggctgcgggctgtgggtgtgtccccgcctggtgattcaggccatctggctgctgtgcgcaggtgctcctcggactctttccggaacatccagacccttgccgagcgtttggaggatgagctcaccagggatcgctgaggacgcctccaacgcctacgcggtcaaaaagcatgagcaggagtgtgtggccaagtctaaccgatcacttcccggcagctgcctagtaaactgcgagtcctctgggacattaaaagacttgtgcaactctaaacttcagcccttgggagactgagaggctatgtagtgagacccctgtgtgaagggatcttcttattctgccctcagcctccttgactcaattaactaaaaatattatttatttgattattgagtttttgtcacccttaagttatgtacctcaaattaaaaaaaataataaaatgggtccttcattggtattgcaaattcctctccaaggtggttttactatattccttccgcaagcagctcttctcctgtatatatgtattttacacacacacacacgcacgcatgtgtgtgtgtgttttggttttttaaaaaagattttagctaacctattttatgtatgtaagtacccggtagctgtcttcagacacaccagaagagggcatcagatcccattacagatggttgtgagccaccttatggttgctaggatttgaactcaggacctctggaagagaagccagtgctcttaaccgctgagccatctctccagcccatgtgtgtattttttgagacgggatctcactatgtagacttgcctgaaagttgatttgtagacttgcactcacagagatctgactgcttttaccagtgctaggattcaaagtgtgggccaccagggacagtcttatatgcatatatgttaattatatacgtatttagcaatgatatgctaataaggatagaacccagggtctcatgcatgcgaagcaagtggtctaccattgagatatagcctcagtccttctttgttattattattattattattattattattgtgtgagttcaggtgctcctgtaccacgtggaagtcaaaggacagttggccgctgtctgttaattcttcgatgggttccaggcatcgaatacaggtcattaggcttgcatagcgagcacttctatccactgagctaactcaccggtttatctcttaaaaaaataacccaaacaaacaaaaaagctgctcaaggtgaaacacacctttaattcagcacttgggaggcagaggcaggcggatcaagcagggctacatagccaggcactgtcaaggttttttaaaaaaaactcaggcttccggcccagagcttcaagtattcagggtttctgaaagccagttgtaatgtaaatcaccagaatcaatgttcgttttaccctaatttcaaaaggtactggtgttcgtgaagttctttcagataaaaaaaaaaaattatttccttactgtgtgtgcgcatctacactaaacaataccgcaaggcaaatttggaaaatcagagagacgtaatacaagtttgtcagttgctataatgtttacagcctatgcagagaataagcaaacttgaaattaaataaatacaggataaaacagaaaactataaagtagaatgcaagtctaatgtttaaacacgaatattcagtctccgtagagactgtcaaaaattgccaatgccgactatatttcaagtcgtcatggcggggtattgggaaaagttttcaattagcaataatcgcgcctcggataaacctcattggctacgatactgccactgcgcaaagctgacgagtaagcgtgctcgctcagcctcccagggctgacgactcccatttcagtcacggtgagcttcagtccacgcgcgacctccacgtgacgggagcggagcccggcggttccatctcggttatctgcgtggacacgttcttgccagtgggttatctcgagcccgaacatccgtgttttgcaaactacgcggcagtcgcttgggatgctggggactcttatgcaaatcgagtcaacgtcatcgcgatggcctgggtggaggctcaaccgcagcgggagaaggagggtaagccagaagggatgaaaggacatgtgtcgtgacggtccgaagcagaggctgacctcggggtggtggtttagaggtctgtaaacctagcactccggaggcggagacaggaggatttgctgagtgttgggccagtcactgatacaagtttgaggagaccggaggcggagacaggattgctgcagccagggataacagacttctcagtatagcaggagaaaaaggaaaccttgtcaaggaaatagaaaactaacacataggaagacggtaggaaaagttgaaaaatgaaattatcttaacaaaagtaaactaggattctataacaatctctaaaaagtagcatgctttttttaaaccacaattattcagtctccgtagagactgtcaaaaattgccaatgccgactatattgcaagtcgtcacggcggggtattgggaaaagttttcaattagcaataatcgcgcctcggataaacctcattggctacgatactgccactgcgcaaagctaaagaactcccgccccagcgcaacgttcctagcagacgaggaccctatttcaaaaagggggtttcgagcaaacgggaaaaccctccattatcgctaccctggaaatgagagcagcaaggacattctcttggcattctctatgtgatagaacggagaggcgtgctggttttatttaagatttaagcagtggaaatgaagcaaagcattatgggaccgaacatgctaatagactggtctccgagcctgcggggggggggggggcgggggaaaggagcggaggcaaccgcccgcgtcaaggtgtaaagttgggcttaacgttaaccactttttccaacgaggctttcttgtttatgactttagacacaagaaaatacgcatataaagtctagaatagcatcaaaggtagtgttaactatcttaaggatgatgtcagcgtcgttgacgacagtcacattcattgtaagaacctgatcttcccaaaatagagctcggtcggcattaaactctgagctccctggcccactttcaggaccagccggtgacaaacgctctcacgctagagactttacacatctgaaaacactgtgtgtgtaagtgtgtggaggtcagaggaccacttgtgggaggcagttctctccttccaccacctgggtcccagggattgaattcaggggaggtttacccacaatctgtctcaccagcccagcccctgtcttcaattgtttggggtatatactagtagtggagttgctggctcatacaggaattctaggtttaattctaagtgaagatttgtttgtttgttgttttgagacacaatggtctccctggctgacctggaatttgctctgtagaccaggctgtcttcaaactcatagagacccttctgcctctgccttcccagtgttgaagattaaagggccccaaatcaacttcaaccccgttttgtggtataggaaattaaatccaacgtttggatttggaggacttcctaacccttctgtgaaaagactttaattctgaggagagaggctaaaaaggcttcgttacccagcaatgctggaacacatgaaaatgggaagtaaatttctctgctttgttttaactttgacaagtagaaagctgttcattcaaaccttgtgtctgaacttcctttttttttttttcctttttagatttatttatatgaatacactgtagttctccccagacacaccagaagagggcatcggatcccattaaagatggttgggagccaccatgtggttgctgggatttgaactcaggacctctggaagagcagtcagtgctcttaaccactgagccatcactccagccctgaccttcttgcctgaggagtagtttccatttttattttggcctttgcttctcattaaagttcaagagcagcagggcagtggtggcgtatgcctttaatcccagccagcactcagcactcgggaggcagaggcaggcggatttctgagttcgaggccagcctggtctacagagcgagttccaggacagccagggcaatacagagaaaccctgtctcgaaaaaccaaaaacaaacaaacaaacaaacaacaacaaaaaaaccaaaaaccaaaaaaaccaaaaaaaaaaaacccccccaaaaaaaccaactcaaaccctgagtccaatttcaagtctctcagaaaagatatcaaacaggacattgaaacccagtgagatgggtagatgggtaaaggagcctgctgccagccctgagtacaatccctgggtctcacatagatgacgaagaaaagcacctctcgataggaggcctctgacttctgtgcagatgccacacacagcgtgcgcatgcccacccaccatcagtaaataagtgtgtggtaaaaaaatctacaaaaatactgatagtggcactcacctccccttcggattcattatgagaaaaaaatttaaaagatttatttacttattttatgtatatgagttctctctctgcgtgtgcaacctgcatgctagatggttgtgagccaccatgtgggtactggggattgaactcaggacctctggaaagacagccagtgctcttaaccgccgagccatctctccagcccctcattatgagaatattaaagtccaaggccaaattttttttttcagttttctaaatgaaatgaacatcaccgatagatccttgtctgggactcaggacatgtatgctcccaggtcccaaagccctctctctgttctggagatcatagtttacctcacgggggggggggggggtgaggggggagacacgctaccttgggagagtgaagacagaagacagcaggggaaaccagaacttccttccatagctccccactgggtaaatagagccagccaatcagctattgaataggggaaaggatgctgcggcaggtaacatgctaaccactgaggccacttcacattctaaaaaggacacaccggtatagagtggcaggttttgctggcttcacttcaggagcggccaagatatgagtaaacaggttccctggcttctctgcaaatcaatgtcgttagaacctgaacccaggcacagcagcctgaacagctacaagctggcagccagcctgggtccagagagttctaagacagcctgggctgtggggtaacactgtcaaaacaaacaaccatgacaacaaaacccaaattaataataataataaccaaagcaaaacaaaaatctggaagcgagacctggtcattgtattgcttatttaataaaacaaaacaaaacaaaacaaaaaaaccctaagaaatggcgttgaagagctgagcacacctgtgattccggcacccagaaggaaggtcatcctcggctacttagtgagtttgaggccagtctgggagaaatgagacacttcccgaaaacaaacaaacaaaccagaacaaaacataaaagagctcctgaagtcaggagagggaatgtatcggtctctatgcattatacgtggctctgctcatagttgctgccaaagcgtccattttcaagtccgtggacacatttcttcgtaatccaaattggttgtatgttggggtgtgtgtgtgtactgcgtatgtgttggggagtcagcggaggccagaggggaatcttggggatccccctcatcactccctactttattccttctgaggcagaatctgacagcgtgtcgataaactcggagttccagttcttccaccaggctgggagcaagcaggtgccagccgtccgattgctctctgctcgcctttgtgctgggaggagagtttatgtgggtactggaatccagacataggtcttcatgcttcagctgtaattctgagcctcagggccatctccccagcacccacgatctattttgctgtttagaataagaacactgtgtgtgcatgtgggccaaaggtggagttggcgctctcctccctcgatccagggggtcaaagttgggttgtcaagtggcagagcttcacctgcctagccacctggcagacccctatcaatctttaacttatagcaggaaatttaattactttgcagtggaagtggacgtgggcacttaggaggaaaaccaatcaaatctgcgaaccgtgttggcacacatcgttcagttcatcaaagttctagggaggcggaggccggtgaatctccatgaattcaaggccaagcgtggtctacataaggagttccaggccagccaaggctacatagtgagaacccatcttaaaacaaacacaaaacaaagggggcaattatttattattaaaagtgtcaaaaaaaattctgggcgtggtggcgcactcctttaatcccagcactcaggaggcagaggcaggcggatttctgagttcgaggccagtctggactacagagtgagttccaggacagccagggctaaacagagaaaccctgtctcggaaaaccaaaaaaaaaaaaaaaaaaaaaaagtgtcagactatacattaacaccctgtctcagaaaaacaaaaacaaaaaacaaagaaagggtcttttggggaggggttgggagagctgaagaggtggctcactggttaagagcattgcttctcaccaggtggtggtggagcacgcctttaatcccagcacttgggaggcagaggcaggtggatctctgagaccagcctggtctacagagtgagttccaggaaagccagggctataaagagaaaccctgtctccaaaacaccaaaacaaacaaacaagagcattgctactcttgcagggggactcagattccatcccgagcacccacagggcagttcacaacaggttgtcactcaagttccaggggatctgacgcccttttatggccgtcaggagctcctcctgtatgcatgaaggtaaaacacacacattattaaaaaaaaaaaaaccagtctattttaaaaagcgtcttggatggagaaatgcccgctagtgtgaattcagggctacccagggctgggctaacgcgctgacaccgagctatagccccagtgctcttacagtattattttgagtccgaggtctcactaagtcacccagactggccttgaactcgtgattcttccgcctaagcctattgagtggcagattattgtcctgtgctactagtgaaagagtttctttaagagagcgaattcctaaattaggactgcttggatcctctttcgcacgcaggacatgggaaatattaaccacttctttggtggcacaagcctctaatccgagcacttgggaggtggagccaggaggatcacggatttggagtcagacaaggctatgtcagaccctctctcagcaaacaacacaagccacaaacaaacaaactacaagaacctcaaaaggcaatcattgccccaggcgtcagcagcatatccggaaccttaactgagctgagcaggaaagacagcgggcaatccgtagaggagcgcccaagaatcttggcgtgggagacacgtaggattctgggacttgtagttttcttccaactagatcggcttcgcggactacatttcccaagatgcacacgtaacaagcgagtcccactgttgggtgagaattgtggaaggtaagtgttctgatccggctgaaggtttcccgctgagcattcttactagggattccatctgtcccttttgttctcgaggggacaaggaggatttatcccggcaaaacccgactgtttagccgttcacacgtagctgggaaatctcatggagaaagcagggtcctgagctcttcttggataggaagccaagcctaaatatgtgtgcctatcactcgatagctccgcattatgtcaaagactgtgtcaaaggcttgtctttacaactagaaaaccagacaggcaagtttgtatgccttgatttttatgtgtccaagtagcagaatttacaatgcagggtaagcagacagagtgattacttagcgtccatcccagaggccctggatttggtaccgagaaccgtgtagaaaaagacaaaacaaaactgacatactaaaattaaaaaatcttttggagaaatgatataattcggtttagttgtattccttggcctgggctacagggaattctgtctcaagtaataataataataataataataataataataataataatatctgatttaaaccaagtagagttatagaacaaatagtcccatgagagataatattaacaaaaatataaatattactaaaacatgtttatattagtagcaggtgaaaaataatgggctattaaaagtctgttttttagggctggagagatggctcagtggttaagagcaccccctgctcttccaaaggtcctgaggtcaactctcaacgaccacaaggtgtctcacaaccatctctgatgagttcttccctcttctgggaagtaggtgtacgcgcaggttgaccattcatatacataaaataagtaaaaaaaaatttttttaaagtttgttttaaaaaatatttaattttttaaaattaaattttattttatgtgtttgggtattttacctgcgcgtgtatttgcgcatcccttttattcctcggcgcttgcagagcgcagacgagggcctgaaactggagttaaagatagttgtaagtcaccattgtaggtgctgagaattgaagggcttccggacgaaccgtcctcccttctgtttccccagtgctacaatcccaggccggggccaccgtggcaaaattttcatagtcgaatagagttccggtgtctatcaattggtgggttaacttgacttgtaaaacccagctgctctcatggatttctttctctccagaataagaatgagcggattgactttcaggccgacaaagggccgttggatcacccacctcagccggccgcgttcttgtggaccctcggggttatttgtgccgcccagccctcctttggaccctgaaaagatcaaagagttacagcgcttcattagcctttccaagaaactcctcgtgatgacaggcgcggggatctccaccgagtccggcatcccagactacaggtcagaaaaggtgggactttacgcccgcactgaccggagacccatccagcacattgatttcgtccgcagtgctccggtccgccagcggtactgggcccgaaactttgtgggctggcctcaattctcctctcaccaacccaacccagcacactgggctctgagcaactgggagagactggggaagctgcactggttggtgactcagaacgtggacgctttgcactccaaagcagggagtcagcggctgacggagctccacggatgcatgcacaggtgcagaagtctgcggggtttggccctaagaagacgtgtggtcccccaggtgaacggcccctggctgtctggaccagggttatcttaagatggagagcaagcaaaggctcccggagcaagttgttctctttggagttaggcccagtgaactgaggagaaggaagtatggacgggagcagggggagggagcaagccaggnnnnnnnnnnnnnnnnnnnnnnnnnnnnnnnnnnnnnnnnnnnnnnnnnnnnnnnnnnnnnnnnnnnnnnnnnnnnnnnnnnnnnnnnnnnnnnnnnnnnnnnnnnnnnnnnnnnnnnnnnnnnnnnnnnnnnnnnnnnnnnnnnnnnnnnnnnnnnnnnnnnnnnnnnnnnnnnnnnnnnnnnnnnnnnnnnnnnnnnnnnnnnnnnnnnnnnnnnnnnnnnnnnnnnnnnnnnnnnnnnnnnnnnnnnnnnnnnnnnnnnnnnnnnnnnnnnnnnnnnnnnnnnnnnnnnnnnnnnnnnnnnnnnnnnnnnnnnnnnnnnnnnnnnnnnnnnnnnnnnnnnnnnnnnnnnnnnnnnnnnnnnnnnnnnnnnnnnnnnnnnnnnnnnnnnnnnnnnnnnnnnnnnnnnnnnnnnnnnnnnnnnnnnnnnnnnnnnnnnnnnnnnnnnnnnnnnnnnccccccctctttttcctcctccttctcctctctttcttcttcttcttccccttcgttctttttcctccatcctccttttcttcttttcttcttctcaccaaaagaaagttgttattgtcttcttctcttcctcctcctcttcttgtttgtttgtttgtttgtttttgtgacagagtgtctctgtgtagcccggatatcctggaactcactctgtagaacaggctagttttgaactcagagagttactccttcctctgcttcctgagcactggtattaaggtgtgtgccaccaccgacacctgcccccccccttttttttgagacagggtgtcttatatccctggctgccttggaacttgctatgtggctaaggatgatcgtgactttgtatttgtgtatattctggtatgtgagcacatgtggggaccagaggtggaaatgtcttccttagttgtctccaccagttgatgggctggcaagtcccaggtatcctcctgtctctgctccctggagttgcggcgataggcctttccttttgcatgggtgttggggtctgaactcaggttctcatgtgtgcatagcaagcactattccaagtgagacatcttctttatatttcttttttctttttttttttttttttttttttttttttttttttttgagtcagggtttctctgtgtagccctggctgtcttggaactcactctgtagaccaggatggcctggaactcagaaatccccctgcctctgcctcccaagggctgggatcaaaagctgcaccaccactgcccggcttctttaaatttcttaatttctgaccctcctgcctccacttcctgcttgctggggttacaagtgtggggcacccacctgccttagggggtgctggggatccaacccagggctttgtgcctactaggtaaaaaacgctaccaacctaatggcatccccacccttcaaaaggtgtctttaaatgaagtggtagtgacagttattataatggacagagcaagtgtggaggggcacgggattgtgtactaaggaaatgagggtagagtatatgttgatgcattaaggacaaaaccactcgaatggaatctagagcagtggctctcaaccttaacacagcaaccctctaatacatcacattgtggtgacacttggccgtaaaattatttttgtggctacttcataactataattttgctaatgatatgaatcctaatgtaactatccatgttttcttttattatttttattatttatcttatgtatgagtacaccagagctgtctttaagacataccagaagagggcatcggatcccattacagatggttgggagccaccatgtggttgctgggaattgaactcaggacctctggaagagcagttagtgctcttacccgctgagccatctcgctagcccactagctgcgttttttctgatggtcctaggcgactcaaggtgtctggactcacaggttgagaaccttgcaaaggggagaaaggagaacacttggatgtcctaaaatgggacgggggggggggggttggaaaagaaagtcactgttttgggggagggggactaaaaatggtcggactgctctggcagctccgcggctcccaggaattatattcagcagatttcatatttgtctttagagtcctgtgcctgaactgtggggagcagactgcccgcagggtgctgcaggaacgcttccaagccctgaaccccagctggagcgccgaggcgcagggcgtggctcccgacggcgacgtgttcctcactgaggagcaggtccggagctttcaggtcccgtgctgtgatcgatgcggcggccctctgaaaccggacgtcgttttctttggggacacggtgaacccagacaaggttgactttgtgcaccggcgtgtgaaagaggcggactccctactggtggtgggatcatccctgcaggtacctgactctgtcagggtggcagttgcctttgcccatcctacagggtgagaactagaagttccttcttatttgggtttcacttcgcgagtgtgtgcgagtgtacgcatgcgtacatgttgaactataaccggcaaggtccttttatttatttatttttatttatatgagcacactgtagctgtttgcagacataccggaagaaggcatcagattccattagagatgggttgctgggaattgaactcaggacctctggaagagcattcagtgctcttaaccactgagccatctcgccagccagcccccacctcagcacctttttatcctttttgtttgtttgtttgtttccgtttctgaggctgcgggtgggttctttcccgggatctagagcgatcactgtgatttgcctgggcaggtgtactctggttacaggttcatcctcaccgcccgcgagcaaaagctcccaatagccattctgaatatcggccccacccggtctgacgatttggcttgcctgaagctggattcccgctgtggagagttgctgcctttaatagacccgcggagacagcactctgatgtccaaaggctggaaatgaactttcctctgagttccgctgctcaaggtaaagagaaagccctctcaggtaaaggggtctagccaggtggagcgtggctctcgcttgtaaatccctcagaggctgatgaaagcggttggcctggagctcaaggccagtagatcaggccataggccactgacaccttaacttcaagcaacaaaacaaaagccaggtgacagattcagcttcctgttacacggagtagtcaggtgccagacaagagagacaattctagactttttttttttaagattttatttattatttattttatatgtaagtacactgtagctgtcttcagacataccaggagggggagtcagatgtcattaaggatggttgtaaaccaccacgtggttgctgggatttgaactcagaaccttcggaagagcagtcagtgctcttaactgctgagccatctctccagccccaattctagacttctttttttttttttttaaagatttatttattatatgtaagtacactgtagctgtcttcagacacaccagaagagggtgtcagatcttgttacagatggttgtgagccaccatgtggttgctgggatttgaactccagaccttcggaagagcagtcgggtgctcttacccactgagccatctcaccagcccccgaattctagacttcttaagactatttttagtcttaagatattcaggagctttaaaaacaaacaaacaaaaagacagtagatggttttattttaggggggcgtgtcaagacagaacaccagaagaaggcatcaggttgtgagccaccatgtagttgctgggaattgaactcaggacctctggaagagcaatcactgagccatttctctagcctggccacctggtttttaatggaaaggtggatggacgttttctcttctcttctcttctcttctcttctcttctcttctcttctcttctcttctctcttccttccttccttcctttctttctttcttattcttttttttnnnnnnnnnnnnnnnnnnnnnnnnnnnnnnnnnnnnnnnnnnnnnnnnnnnnnnnnnnnnnnnnnnnntcctctcctctcctctcctctcctctcctctcctctcctctcctcttccttccttccttccttcctttctttctttcttcttcttttttttttttccgagacagggtttctctgtgtagccctggctgtcctggaactcactctgtagaccaggctggcctcgaactcagaaatccccctgcctcgtttggcattaacttgtttcatttcttttcagatccctaaggatccccccaccccccaatgccgctccaactctgaatcctagaggtggcaaagccacgtctagaggccaggcaccctcctgtttacagaaatgagagctgccccctaaggaaagacttttccaaagaaatagctgctcttgatggagtagctgtgtcgccttctggtaaccggaagaaggaccaggcagaagtcagtaaaccacaactgtctatgaggggcaacgtggagatagatctcactcattcagggcatttataattcattcataattccaaatggatgtgtctgactgaagcactttgatatttctgatggcaggagcaatagctaacacggcttttttttttttaattattagccaaataataaattatttttaatagcataacaaatgtgtggactgtgaacttacacatatcttttaagcagctaagaagaaagcaggctttacgctcccgtgtcatagggatttctccttgatgttagctggctgagggtgacgcctaccttgaacctggtttctagagagaatggctaattcctgtgggctcctcagctgacttttttgattacagccctcactggaaagaatcagtgtaccccaagacaggaggcacaggggaggcacactctacttcagaaagactcgtgcctgagatgagggcaggggacccacacttaccctgctccagcctcggcagcaatctcagctcttgagtggccgaatgaacatgttgggaactgtactctgagagagtaggcagggctcttaactgctaggccatctctccagcctgcctttgcctcttgggattaaaggcatgcactaccccatccaacctttttttttttttttttagatctgtttatatgcattttagtatataggtactttgtctgtacatgtgaagaccagaagagagtatcagatctcattgtagatggtgagctgtcatgtggtgctgggaattgaactcaggacctctgaaagagcagccaatgagtgctctccgccactgagccatctctccagacccttcgttttctttttatatactttagttaaaaacaaatcacaaccaggtggtggcagtgcagatctttaatcccagcactcaggaggcagagacaggcggatctccgagttcgaggccagcctggtctacagagtgagtttcaggatagccagggcagagagatcctgtctcaaaaaacaaacaaaacaaaaccaagtcacaaacgttaaagagccaagacaaactaaaactaagacccatccttaggaaaatattcaacatcatttacaacacacttaggaagcatattatgacctacttcctcacatcccagccccacaagtccatgatatatatataatatatatgttaaatatatattatatatagtaataggtactattatttcttttgaaagatgacattactcgagggcaggtgtctctctgtgtgtagcttactgttaacagccttcctagcatgtgtggagccataagttcaatcaacagcatcaaaaaaaaaaaaaaaaaaaaaagaaaaagaaaaaaagaaagaaagaaaaaaaagaagagaaagaaaaaacgtgaaaagcaagtatcctgaaagtatcctgaaacatggtcctagtttgctttgtgctgctgtgctaaacaccatgaccaaaagcaacttggggagaaatggtttatttcattttatagattacaacccatcactgaggcaagcccaagaggagcttgaagcagaagcgtcccaagtgctgggattaaaggcgtgctccaccaccacccggctggaggaatgctttcttatgcagcccacacccacctacctagggatgacaccgcccacagtgggctggaccctccttcatccatcaagaaaatgctctgcagacatgcctacaggacaatacaacagggacaatcctttccaggttttcccttcccagatgtgtgtcaaaggggctcaacagttaagagcactttcgctcttccagaggaccagggttcaattctctgaacccacacagtggctggtgaacaatgcctcctggcccaaagccctctcgcctttgcctgtgcggtcaggcatctgtcacgcagcccactagcactacagcacctcctttctcccatttctcacccttaccaggatagaaaccatgtggggtttcatgttcaaacttctacccccttccagctggattctggacagcaattacgagctactaccggggtcacggatcacagtgcctgcgcaggtggcctggcctgacctttgggaagggaggggtggataactaaagtgagagagagagagagagagagagagagagagagagcgcgcgagagagacagaggaggttgggggggagggaggtgaaggggaggggcaatcaagaaccacgtgtcctcacagcagccaatcagacacctgactccgaaatccgttgactggggaaccagggattaaccaggttgtgcgcacgggacaggggagacagggacagagattaaccaggctgtgcgcaggtctagacgatctggtgttttgtatgtcaggctggcttctaattcactctgtagctaaggggacccgaagctcctgatcctcctgcccccaccttctgggtgctgggtacattacaggcatgcgcccatgcccaggtttattagctattgggagtcgaacccagggcctcctgcatcctaggccagcacactgtcacctgagctgtgttctccgttctcttttgtttcaatcacgtgaaagaactatgggaacaaacgcctgactgcctatttttctgccatacactaagcttccagcttctttccgcagggccttcacagttctttgaggattagggttgctactctgagcctcgacgctcagcaggggtttccaaagaaccctgggagccagagattcaaaggtggctaagctgcctcactctgcctccttagggttcacaagctcgggagacttccgaagattgaggttctaagcttagcctgtcacctggaaacgagtgactgggttacatagtgagtcccaggaatacacggtaaaaccctgtctcaaaaaattatcatacataatgagttccaggccaaccgggctatctcaaagaaggaaaaacaaaaacaaacaaataaaaagactgggttgagattattgcaaatagaagcagaaggatgagctcagatgaaaactggttcaaacaaatcagagccggcttcccatcctactatcggaccgggtctcagcttagaaaaacaagattcctcatagtcgccatacagcagacgatcgagaccttagagaggcacaggctgtgtgcagggtaatccattgatcgtgattgcaaaccagcagccacttttcttattcttttgttccaagacagttggttattcctgaaactcaccctgtagaccaggctggcctcaaactcacagaaacctgcctacctctgcctcctgtgtgccgggatgaaaggtgtgcactaccatcacccggattatcgtccattctaggaggcgcttgattcctggaaatgttctctttcatcttgcgcttccaaggctagacggaatgctttcctctgaggatctagccctgctcggtggacagagataacaatcaccaaaaccaggctctgacagcaggtactttattagagggcgcagggtgaaataagacagcaaggtgggcggggccggcgtgggcaggaagtgaggtgacaggctaacagaatttcccggtgtcaaggtttttgtattccttgttgtacgggaccttggagaagcagatggcggcctcacggtcacagttgcagatgaagtcctcgcatttgttgtttttggctagagagaaacaagaacagagaatcgaatcgagtggagcccaggacgccacatgacagaatggaaagaacctggtgaccattccgtgggttgcagatgtagggttgagagacagaagcaaaacgaaagtacgttggggttgccaaattataatagaaatgtacttcttgtgctggagagaaggctcagcgcttaagagcactgactgctcttccagaggtcctgagttcaaatcccagcaaccacgtggtggctcacgaccatctataatggaatctgacgccctcttctggtgtgtctgaagacagcaacagtgtacttacatatataaaataaataaatcttaaaaaaaaaagaaagaaaggtacttcttgggctcagtggatcaagtggataacacgcaagctccagcctctaactgaggatccccgagcccttgagcaaggtgtggttggggcatctgcaactctgtcagtaagtggagagcacaagtcgccagcacttgttggcctgtcaggctacaggtgagtgccttgattagtgagaggctgggtctctaaagatatgacagagagtgatagaagacaccaggatgccaacttattcttagacataaaataaagaaacattgtcaggagtggtggtgcacctctttagtcccaggacttgggaggcagaggcaggaggatccctgagttcgaggcctgcctggtttacagagcaagttccaggacagccagggctacacagaaaaaccctatctcaaaaaaacaaaacaaaacaacaaaaacaaaaaaaaaaacataagcagataaacctaaaaatcagaaaagtacaaatattggctgtaataatatttttgtgaattgtgtgaagattacccttgtagtatgcaaatgctgatctctctatcccaccattaatctggagccggtattgcaatgcttatattaagaatctcctgtctcaaggggcgggagagacggctcagcggttaagagcactgattgctcttccagaggtcctgagttcaaatctcagcagccacatggtggctcacagccatctgtaatgagatctgacgccctcttctggcgagcaggtgtacgtgcagatactcatacatcaaatctgacgccctcttctggtgtgtctgaagacagctagttatgtacatctcctgtctcaagtttgtgtaaacaatgcacaccatttattctctgacttgtcaataaaatctggaaaagccaatagctaggagagacgggacttgtgggaggagaaaggattcagagaggcagggagacttgggcacgaggaaggaggaaggaacaggcttgagaatttaacttgagcgtggaaggctctaagtgcaaggattatggggactttggctgggaagtagcaaggttagatcagaggattagactagaattatactgtctagttattgtgcttttacacaaataaatcttagtctctatgtcattatttggggacaagcaaggtttaagaaaaactgctgcggggcctggtgagatggctcagtgggtaagagcacccgactgctcttccgaaggtccggagttcaaatcccagcaaccacatggtggctcacaaccatctgtaacaagatctgacgccctcttctggagtgtctgaagacagctacagtgtacttacatataataaataaataaatctttaaaaaaaaaaagaaaaactgctgctctaccaatttcctgaatacatttgtaatattaattcttacatcaactaccacttataaattatatatcctgggctggagagagggctcagcagttaggagcactaactgccattccagacgtcctgagttcaaattcccagcaactacatggtggctcacaaccatctgtaatgggttctgatgacctcttctggtgtgtctgaagagagcaatggtatatatatatacatatctaaatgtatgtatgtatataatagataaatctttttttaaattatatgtcctgcctctacatgctggggttacaggtatgcaccaccatatcaatgtataggttccagggatggaactcagggctctgtgcatgctagacaagcgatctataactgagttacattcccaaccctctgattcctcgtctgtaacgtggggatgagaaatctttcccgaatagatgtttagttcagtgtttggcatataagcaatgatacagcttccacgtgtttagtaaatacaaaatcagtatataacatagcagttaaggggagaagctttggggaggcaagctggctcagggaacaaaggggcttggtgctaagtctgagcctgggtcccattcccgggcctcacatggtggaaggaaagaactgactcccgaaagctgtgcacgtgtgtaatgccatagacatgcctcccgtaaatacataaaatctgtcaaatgtgggcacactaaatggtgactgtccctgtccctccctcccccttccaaacccgccagaggccaggtagagagtcccgaggtctcagaaggtaaccctaccgctgcaggtgatctcgctcccggagcatgagtaggagtaagtgttggtgtaggggttgtctatgaggaatttacagctttccagcttcttggcctgactgtagcagtggtcatgagtctggcagcacctggagagaggaagaaatggctgaaggtggggtagtgcacccaccggaggtcggttctcagcttgcagtctttctcaagcaagcgaggctgatttaagcaccaatgttccagaagcaatggctggagaatgactcgagattctgtgatcgctattagcatatatttattgaaagctactttttccaggtgtggtggcccccgcctttattcaatcccagtacttgagggttgggcatttagctcagtggtagagtgcttgcctagcaagaacaaggctgtgggttcggtcctcagctctggaaaaaaaaaaagacaatcccagtacttgaggcagaggcaggtggatctctgagtttgagatcagccagggctatacagcaagaccctgtctcaaaaaatgacttttttgttttgtttttttgttttttgttttcaagacagggtttctctgtatagttctggctgtcctagaactcattctgtagaccaggctggcctcgaactcagaaatccgcctgcctctgcctcctcctttttttttttttcaaagctgcaggaatacagtgaaattacaagttatgaagttgcgatgacttttttaaagccaaggctgacatgtggatggttggcagtaccctgctctgccactagacgctagcatcgcgcactttacatttccactttccactttcggagaccactagattaatgggtcctctaggacctctttctttacataacaagaggtgaaaatatatgctgagcattgtgatgcatgcctttaatttcagcactcaggaggcagaagctggaggatatctgagttcacaggcagagttaggctacacagagaaaccctgactggaaaacaaacaaacaaacaaacaaacaaacaaacaaatgtaaataatgaataactaaacaaaaagaatacacacgacgctcagggactgtgcatgcctccccttcctgcctctcgagacgagatgtgattggccggttctctggccccacccccgtgcccacgctccagtctcccatgggatagaccactcacctgtctaagtcgtccactggggtgccccagccgcccaagccacagtagcagccatagttgttgtaatccttcaggggatcactcccggggatggtgcacttgatcatattgcggaactgccacacagcccgagggctgatgctgtgtgcagcagcgcctgctgcaagagtgtacagcacattcaaatccactccgaactgctttacccggggtccgaagcctgcctgttatcttctttctcgcttcctatcagttgctgcctcgggagagcatcggttcccagaagcctactaatgtgcggatgattgtctcttttcattatttagatcttggagctaagtcgaacctgagcaggaaggtgtctagcctccaactcagcagcaaccctcctgcctcatcctccccttgtgctaggactataaacgagcaccactggaccgggctgggcttgaactcagaaatccacctgcctctgcctcccaagtgctgggattaaaggcatgtgccactgcctggtaataataaacaaatcttaaaaaaaataagaagtttgcagatggaagccaggactttgtgcttgcttgattgaaacagggtctcacataacctgggaaagccttaaacttgccttgtaagaagataacttcaatttgaacttcttttttttgttgttgaatggggagcctgggctacgtgttaccctgcctcaggaaaagaagttggaggaggaggaagatggaggcaaggatgaaagaatggtgtggtgctcagtgcctcccacacgcaggaacagccaacaggagggcaatcagtaagtaagtaggtctgagccgaagctgggtcagcgcaggccagtgtggaccagttctgagtttgtctcgctgtgcccttcagggctgtgttcataaatgcacaaacatcctggatttccctcagccccagtgtcggccctgcacctcagcctgaggcttctcccttccatgggtctgggactccacttcatctcttctttctctccactgccactcctgcccaggtcaccaatggacaagtggccggaagcacaaataggcttgccactctctgagtcactttctgagagttcctggactgactgaaatgttactatttatttaatcctctctctctctctctctctctctctctctctctctccctctttctttttttgagtctacctatagtccaagtcttttttttttttttttttttttggtttttttgagacagggtttctctgtatagccctggctgttctggaactcactttgtagaccaggctggcctcgaactcagaaattcacctgcctctgcctcccgagagctgggattaaaggcgtgctccatcacgcccggtttatagtccaagtctttttttttttttttttttttattaaagatttatttattatatgtaagtacactgtagctgtcttcagacactccagaagagggagtcagatctcattacagatggttgtgagccaccatgtggttgctgggatttgaactctggaccttcggaagagcagtcgggtgctcttacccactgagccatctcaccagtccaagtcttaaattctcaatcctcctgcttcagcctcctgaatggctagagagatcttggcctcgatgcttccccattaaagaggatcttccggtccacacatccaagcagtgtctctactgtcccatgtttttttgcttcatagtacttcggtttgtgtttggactgacatatgtgtgtgtatgtgtgcatatgtaggtggagggcagaggtcaacatctggaatcttaactcactctcttattcttgacaccgagtctctcagtgagcccggggcttgccacttggctatggtggctgagagctgggggcttggctatggtggctaagcagcaagccccggagagcttccacctgtctccatctctgaagtcatggaattgtaggggtgtcgctgctgtgcctggatttttctgtgggtgctaaggcatcctagctaatgtgttcccactcagtcggtaggacaggaggttctcaagagcaggtctcctggctttcattctccttaaagcctatcactgtgcttaacacacgttgtggtgtatgtgtgtgtgatatgtatttgtgtatggtatgtgtgtgcctgtgtgtgtggtgtatgtgtgtgtattgtgttatgtgttgtttgtgtgtgtttgtgtatgtctgtatatgtgtggtgtatatctgcttgcgtgtgtggtgtgtgtgtctctttgtgtgtatatgtgtgtgtattgtgttgtgtgttgtttgtgcatatttgtgtgtggtgtgtgttttgtgtgtgtggtatatctgtgtttgtgtctatgcagtgagtgtatttgtgtttgtgtgtgtgtgcatgtgactctagataagccatgaataaagtcagtgagtgaagtatgtgcctggtacctagtagacactccacaaaattctgttgaatgaatgagcaaacctgtgccatgactgcgcttgcccaaagcacaggctttgcagagcagctcgtggagcagaggccgtcagccgcttgcacagagtcctgctgcataaagagcacagagaacaagggactttcggggtcccatctcctcagtcaccatgctgccttatcgtctcacacgttgtccagttccatcttttcatctttcttccattctcttttttatctttttgagacaaggtctcactcactatactgt

SEQ ID NO: 616 - DNA, 1697 bp, Mus musculus
tgagcattcttactagggattccatctgtcccttttgttctcgaggggacaaggaggatttatcccggcaaaacccgactgtttagccgttcacacgtagctgggaaatctcatggagaaagcagggtcctgagctcttcttggataggaagccaagcctaaatatgtgtgcctatcactcgatagctccgcattatgtcaaagactgtgtcaaaggcttgtctttacaactagaaaaccagacaggcaaaataagaatgagcggattgactttcaggccgacaaagggccgttggatcacccacctcagccggccgcgttcttgtggaccctcggggttatttgtgccgcccagccctcctttggaccctgaaaagatcaaagagttacagcgcttcattagcctttccaagaaactcctcgtgatgacaggcgcggggatctccaccgagtccggcatcccagactacaggtcagaaaaggtgggactttacgcccgcactgaccggagacccatccagcacattgatttcgtccgcagtgctccggtccgccagcggtactgggcccgaaactttgtgggctggcctcaattctcctctcaccaacccaacccagcacactgggctctgagcaactgggagagactggggaagctgcactggttggtgactcagaacgtggacgctttgcactccaaagcagggagtcagcggctgacggagctccacggatgcatgcacagagtcctgtgcctgaactgtggggagcagactgcccgcagggtgctgcaggaacgcttccaagccctgaaccccagctggagcgccgaggcgcagggcgtggctcccgacggcgacgtgttcctcactgaggagcaggtccggagctttcaggtcccgtgctgtgatcgatgcggcggccctctgaaaccggacgtcgttttctttggggacacggtgaacccagacaaggttgactttgtgcaccggcgtgtgaaagaggcggactccctactggtggtgggatcatccctgcaggtacctgactctgtcagggtggcagttgcctttgcccatcctacagggttcatcctcaccgcccgcgagcaaaagctcccaatagccattctgaatatcggccccacccggtctgacgatttggcttgcctgaagctggattcccgctgtggagagttgctgcctttaatagacccgcggagacagcactctgatgtccaaaggctggaaatgaactttcctctgagttccgctgctcaaggtaaagagaaagccctctcagatccctaaggatccccccaccccccaatgccgctccaactctgaatcctagaggtggcaaagccacgtctagaggccaggcaccctcctgtttacagaaatgagagctgccccctaaggaaagacttttccaaagaaatagctgctcttgatggagtagctgtgtcgccttctggtaaccggaagaaggaccaggcagaagtcagtaaaccacaactgtctatgaggggcaacgtggagatagatctcactcattcagggcatttataattcattcataattccaaatggatgtgtctgactgaagcactttgatatttctgatggcaggagcaatagctaacacggcttttttttttttaattattagccaaataataaattatttttaatagc

SEQ ID NO: 617 - protein, 405 aa, Mus musculus
PFTRSWEISWRKQGPELFLDRKPSLNMCAYHSIAPHYVKDCVKGLSLQLENQTGKIRMSGLTFRPTKGRWITHLSRPRSCGPSGLFVPPSPPLDPEKIKELQRFISLSKKLLVMTGAGISTESGIPDYRSEKVGARTDRRPIQHIDFVRSAPVRQRYWARNFVGWPQFSSHQPNPAHWALSNWERLGKLHWLVTQNVDALHSKAGSQRLTELHGCMHRVLCLNCGEQTARRVLQERFQALNPSWSAEAQGVAPDGDVFLTEEQVRSFQVPCCDRCGGPLKPDVVFFGDTVNPDKVDFVHRRVKEADSLLVVGSSLQVPDSVRVAVAFAHPTGFILTAREQKLPIAILNIGPTRSDDLACLKLDSRCGELLPLIDPRRQHSDVQRLEMNFPLSSAAQGKEKALSDP

SEQ ID NO: 618 - DNA, 42360 bp, Homo sapiens
cctgggcaacatggtgaaaccccatctctaaaaaaatacgaaaaaagttagtcgggcatggtggtgggcgcctgtagtcccagctgctcaggatactgaggtaggaggatcacttgagcccaggaggtgaagaatgcagtgtgccactatactccagactggaggacagagtgaggctgtgtctaaaaaaaaaaaaaaaaaaaaaaaagataaaaaagatacttatacaaattaaattgaaacaactctggaagaatgcacactaccaatgttaactggctagggttggggctggaggaatggggtggctgggaatcaagagtagaaaggagatttcactaagtactcttttgcatagtttgaatttttttttttaggggcggagtcttgctctatttccaggctgcagtccaatggcacgatctcggctcactacaacctccgcctgctgggttcaagcgattctcctgcctcagcctcctgagtagctgggattacagatgcatgccaccgtgcccagctaattttttgtatctttagtagagatggggtctcaccatgttggccaggctggtcttgaactcctgacctcgtgtaatctgcctgccttggccacccaaagtgctgggattacaggtgtgagccattgagctcggcccacatatgtaacttaatctattgctaaaacaaattaatattttacaaaaataggccaggcacagtggctcacacctgtaatcccagcattttgggaggccgaggcgggcggatcacgaggtcaagagttctagaccagcctggccaacatggtgaaaccccgtctctactaagaatacaaaaattagccaggcatggtggtatgcctgtaatcccagctactggggaggctgaggcaggagaatcacttgaacccaggagtgggaggttgcagtgagctgagatcgcaccattgcagtccagcctgggtgacaagagggagactctgtctcaaaaaataaaaataaaataaataaataatttttaaaaagtacatttaaaaaaatgtcactactggacgggtgtggtggctagtgcctataatctcagcacttagggaagccaggcgggaggatcacttgagttcaggaaaacagcccatctctacaaaacattaaaaaattatccagttgtagaggtgccaacctgtagtcctaggtactggggatgttgaggaaggaagattgcttgagcccaggagttggaggctgcagtgagccatgatcacaccattacactccagcctgggtgacagagcaagtccttgttccaaaaaagaaagagaggagcgcagcactgccgcccggcccctccagcttcccggaccacggccaacctcgagcgcaccttcatcaccatcaggccggacagcatgcagtgcggcctggtgggcaagatcatcaagcgcttcgagcagaaggggttccgcctcgtggccatgaagttcctcccggcctctgaagaacacctgaagcagcactacattgacctgaaggaccgcccattcttccctgggctggtgaagtacatgaactcagggccggtcgtggccatggtctgggaggggctgaacgtcgtgaagacaggccgagtgatgcttggggagaccaatccagcagattctaagccaggcaccattcgtggggacttttgcattcaggttggcaggaacatcattcatggcagtgattcagtaaaaagtgctgaaaaagaaatcagcctacggtttaagcctgaagaactggttgactacaagtcttgtgctcatgactgggtctatgaataagaggtggacacagcagcagtctccttcagcacggtgtggtgtgtccctggacacagctcttcattctactgacttagaggcaacaggattgatcattcttttatagagcatatttgccaataaagcttttggaagctggaaaaaaaaaagagagaaagagagaaggggagggaggggaggaagggagggagggaaggaaggaaggaaggaaggaaggaaggaaggaaggaaggaaggaaggaaggaaggggaaagttaaatagaaagaaagagacacagacgggccgcgagcggtagctcatgcctgtaatcccagcactttgggaggctgaggtgggcggatcacaagatcaggacatcaagaccatcgtggctaatacagtgaaaccccgtctctactaaaaatacggaaaagtagccgggcgtggtagcacgtgcctgtagtcccagccacccgggaggctgaagcaggagaatcagttgaacccgggaggcggaggttgcagtgagccgagatcgcgccactgcactccaggctgggcgatagagtgagactccatctcaaaaaaaaaaaaaaaaaagaaagaaagaaaagaaagaaaaaagaaagaaaagaaaggcagtacagacaataacaagaggggcctcaaccgctcaagagtgattcaactgagacttgaaaacatttcctggaaaagagctaaccctagcttgatgttttgcgaaagggaggctgtgggaagagcattctggaaggaggggttggtatttggaaaggtatgccgagggccccagaataggggtagtaagacggaaagtttccagcctcccctggcttatctcaaggaggagcctcatggctcagagggtgggtcctaccaggcccttcggccctctaggagaggctcctcgtgtccaggaaacccaaaacaggcaagggtttaaatctcagttctggctgggtgcagtggctcacgcatataatcccagtacttcccaggctgaggtgggtggatcacttgagctcaggaggtcgagaccagcctgggcaacatggcgaaaccctgtctgtaccaaaaaaacaaaaaattagccaggcgtggtggtgggtgcctgtggtcccagctactcgggaggctgaggtgggaggatcgcttgagctcgggaggcggaggttgcggtcagctgagcttccaccactgcactccagcctgggtgacacagtgagaccccatctaaaaaaaaaaaaaaaaatcccagttctatttgccaactgtgtagtctttggcatgatacctcatctttcacctttctgagcctcacttttctcttcagtaaaatgggagtgaggttctacaggtttaatacttagtagttgtgtggtttgagaccaagtgacttgaccactctgagcctcagttgccttctttgtaaatctggataataaaacatatatatgccttccatggctgttatgtggatttaacaacaaaaacaaaaatgcacaaaaagggctgagaaattgtagctattagcatcattgaagaaccgaggtgagactttagggctaagagggaaaaggacagatttggggatttatccagccacccaagtgctgaatcgagttgttgtgagttaataataaatattattattattgagtacacattgtttaacacgtgtaaagcatcacgttaagtctttaaaacctaatgggtgttttatgtcctatttacaggccaggaaactgaggcttattaagtaaagtcacctgctcccagctacagctacaaagtggaagagtcaggattcaaacccaagactgtctgactcatgaaggggagtgtcagggttgtgccacagcctttgggcaagtccaggattcccagccgacttggacacagtgccttgggaaggctctggttgcctctgaatttgggagaaggacacagtctgggttactgccctgcataaaaccttcatgacaccagaataaagcccagtggtttttcatgatctcattggaggacccagtatgtacctcctcaccaactctctctacttcctcccttctcagctccactcactgggaataattttcaggttgttcaataagccttgttgggccgggcgtggtggctcatgcctgtaatctcatcactttgggaggccaaggcgggtggatcacttgaggacaggagttcgagaccaggctggccaacatggcgaaaccccatctctactaaaaatacaaaagtcagccaggcgtggtggtgcatgactataatcccagctactcaggaggctgaggcaggagaatcacttgaacccaggaggcaaaggttgcagtaagctgagatcgtgccactgtactccagcctgggagacagagcaagactccacctaaaaaaaaaaaaaaattggccacgatggccaggtatggtggctcccgcctgtaatcccagcactctgggaggccaaagcaggtggatgacctgagatcgggagttcgagaccagcctgaacatggagaaaccccatctctactaaaaatacaaaattagccaggtgtggtggcgcatgcctgtaatcccagctactcaggaagctgaggcaggagaatcgcttgaacctgggagacggaggttgcggtgagctgagattgtgccattgcacttcacctggacaacaagagtgaaactctgtctcaaaaagtaataataataaataatacaaaaattagctgggcatggtgatgcatgcctgtagtctcaggtatttgggaggctaaggcacgggaattacttgaacccgggaggcggaggctgcagtgagtcgagattacaccactgtactccagcctgggcaacagagagagagactctatctcaaaaaaagagacaaaaacaaacaaacaaacaaaaacaccgggcacagtggctcacgcctctaatcccagcactttgggatgttgaggtgggtggatcacttgaggtcaggagttcgaggccagcctggccaatatggtgaaaccccatctctactaaactacaaaagtagctgggcgtggtagcccacgcctataatcccagctacttgggaggctgaggcaggagaattgcttgaacctgagaggtggaggttgcagtgagccgagatcgtgccattggactccagcctgggtgacagactgaaactccagctcaaaaaaaaaaaagaaagaaagaaagaaagaaaggaaaaaaaggctgggctcacgcctgtaatcccagcactttgggaggccaaggcaggcggatcacctgaggtcaggaatccgagaccagcctggtcaacatggtggaaacccatctctactaaaaatataaaaaattagccaggtgtggtgacgagcacctgtgatcccagctactcgggaggctgaggccagagaatcgcccgaacccgggaggtggaggttgcagtgagccgagattgcaccactgcactccagcctgggcaacagagcaagactctatctcaacaacaacaaccacaacagaaaggccacatattcctgactccaggcccctgccagtgctgttaccactgctaaaatccatcctgccctctttgtcccggttaatgcctctcctccttcagttcacagctcagctacccccttcttcaggaagccctccttgacaactacccaggcttagctagtcagtcccatgaccaccccatccccactaaagtacttaactctgaaacaggcaccaaaggaagcactcttcccatatctcacttaatactcaccaaatctctggccggtcgtggtggctcatgcctgtaatcccagcactttgggaggctgaggcaggtggatcaggaggtcagatcaagaccatcctggctaacacggtgaaaccccgtctctactaaaaatccaaaaaattagccgggtgtggtggtgggtgcctgtagtcccagctactcgggaggctgaggcacgagaatcacttgaacccaggaggtggaggttacagtgagccgagatcgcgccactgcactccagcctgggcagcagagcgagactccatctcaaaaacaaacaaacaaaagatactcaccgaacctctctggtagtgggtctcatctttgcagaaacattggaagctttaacacacattttttttgccctgacccattcctcagaaattctgatttaatgggtctggaatgcagccggggcacagggatttttgtaaagctcctcaggtggttttcttgcacacacagtcagggtggagacctaccgaactctgagatagaatcaggactctttttgtttttacagccagggacactgaagcatgagagggtagatgagtggcttaccgtcatgcaagtagagaataacgaagcaaggtcttgaacccaagtctggcttcaaagcttcatgggggaaaaaaaaatcagttggcctcagttaatttcccagcaatggagaaactgtagagcttagagccagctctgttttgagacagacactgagggccccttgggcatgggatatttttaacctagaagctggtgattcttgctaacattctgcagtgccttgaacactgagcagattgtttaggggtctgtgggctctttccctgctgagatagcccttgtagtagggcttttccatcctctggagccagtgggtgggagggtgggtgggggttggcctcatggcgggtggggtggctaatgtatccaaggatattacctacatggtggatagggagaaggtcagttttggatgagcccagatttctcctccctccgagacattttatctcacccaacacagccccttctcccttctctccacctggaaaacagctggaagacaaacctaggttgaagctggattgtacactcagcgcctcaggaaaatggatgcacgttcaccctcccgcttcttcccctccctgacccgtgacagccccgtgaaagctgcagaacacttacaaatgtatgtatcaggccaggcgcggtggctcacgcctgcaatcccagcattttgggaggccgaggctagtggatcacgaggtcaggagttcaagaccagcctggcaaatgtggcaaaactccatctctactaaaaatacaaaaattagctgggcgtggtggcacatgcctgtaatcccagctattcaggaggctgaggcaggagaatcgcttgaacccaggaggcagaggttgcagtgagctgagatcgcaccattacactccagcctgggcaacagagcaagactccgtctcaaaaaaaaaaaaatatgtatatgtcaaaccttctccagctgtcctcatatgtgatttgttgggcaaatacattggtatagtcttaggggtgccagtatagggatatcccttaaaacgcaaaataagcatggcctttgaggaggcaattctacctatagaaattttccccacgcccagattacctgaggcgaggagatcgagaccagcctgaccaatatggtgaaaccctgtctctactaaagatacaaaattagtcaggcgtggtggcaggtgcctgtagtcccagctattcgggaggctgaggcaggagaatcgcttgaacccgggtggcggaggttgccatcagccgagatcatgccgctgtactccagcctgagcaacaagagcaaaacttcgtctcaaaaaaaaagaaagaaagaaagaaagagatttctccccagaaataccccaagagtaaggaaagatgacgtagcatcaagcgtattcattatagcattgcttatgggaaaaactggaaacaactcacgtgtccaataatgggggattggttaaccttggtaggtcacatccatatgggaaaaggggaattaggtgctggcatggaaaatgtgtccacaatgtattgtacagcagaaagaaaaaggaagtaatagaactatatgtagagtataatccaatttttttttttttttttgagatggagtctcgctctgtcgcccaggctggagtacagtggcacgatcttggctcactgcaagctccgccacccaggttcatgccattctcctccctcagcctcccaagtagctgggactacaggcgcccgccaccacgcctggctatttttttttgtatttttagtagagacagggtttcaccgtgttagccaggatggtctcgatctcctgacctcatgatccacctgcctcggcctcccaaagtgctgggattacaggtgtgagccactgcgcccggccaagtataatccaatttttgttaataattatgttgacctataagtagaacattttggaggaataatctcacgtacctgtgactatctccttggagtcaaggtgagattattgtgagagcctttgtcactgtttcatgtgtatatttgaattttatatacaaacatgcagtaatttttgtattcagaaaaaagaatttagatttgaaacagaaaacaatgatacgtaaaaatcacatgaagccctctctcccctccttgcttgcagaataataacaaaaaaatggatccactttaatatggttaattttatgttatgtaaattttacctcaatttttttgtttggattttccttgtgggggattttgagatagggtctcactctgtcacctgggctggagtgcggtggcgatatcacggttcactgcagcctcgacctcctaggctcaagcaaccctcctgcctcagcctcctgagtagctaggattacaggcaaacactaattttttaatttttccaggcacgatggctcatgcctgtaatctcagcacattgggaggccaaggcaggtgggtggcttgagcccaggagtttgagactagcttgagcaatatgcaaaacctccacccctacaaaaaataaaataaaattagctgagtgtggtggcacgtgcctatagttccatctactcaggaggctgaggtgagaggatcacttgagcctgggaagtggagattgcagtgagctgatattgcatgactgcactccagctggggtgacggagtgagaccctgctctctccaaaaaacaaaaacaaaaagaacaacaacaaaaacattctcatattttttggtagagacaagtgtctcatgatgttgcccaagctggtcttgaactcttggactcaagagatcctcctgccttggcctcccaaagtgctgggattacaggcgtgagccaccaggtccggccaagaacccatctctaataaaaaatctgcaataaacagtaagtcgagttttcttctagcgtgtgatgatgctaattatacaatgctacatttcttcccctgctgttcaagctgtggaccctggaccagcacctgcgaacttttagaaatgcagaatcttagtctccatcccaggcctcctgaattggaatctctaggaatggggattcgatctgtgtcttaacaaattctcaaggttatttttatgcacgccaaaatttaagaaattgttgtagtttgattttgaaaggacatgcactcttcttttcacgttatttctaagttttggataacttttttttttttctttttgagacggagtctcactctgtcgcccaggctggagggcaatggcgcggtcttggctcactgcaatctccgcctcccgggttcaagcgactcccctgcctcagcctcccgagtagctgggattacaggcgcccacgaccatggctggctaattttttttttttttttttttttttgtatttttagtagagatagggtttcaccatgttggccaggctggtcttgaactcctgacctcgtgatctgcccgccctggcctcccaaagtgctgggatgacaggcgtgggccaccgctcccggcttcttcttctttcttttttctttttttttgagacagagtctcactgtcacccaggctggagtgcagtggcgcaatttcagctcactgctaccttcgcctccacgtctccagtctgtgaggtccttgaactggggactgagtttaatttgccactggagctgtttttcccagcaccgtctttgaccttgtaggtactgttgccaccctttttgccacctctttttgctacaggctggaggagtcttttatgggcggtgtcctaagcaggtccagctggatccgccatgcccagagttgtgactcctgaggacctctgtccatggacagcccaggtcttcgtaaaaaggtaagactggaagaggctggtgtagtgggaacaagtaccacactaggggcaagagaacctgataagccccagctctgccgaggactccacagtaggacctgagcaatcttctgtgcctttttccctcttggtcgctttaaaaggaagaaaacgcggtggttcacacctgtaatcccagcacttcggaaggccgaggtaggcggatcacctgaggtcaggagtttgaaaccagcctggccaagaaggcgaaaccccgtctccactaaaaatacaaaaatgagccgggcgtgatgttgggctcccgtaatcccagctactccggaggctgagacagagaatcgcttgaacccggaatgtggaggttgcagtcagccgagatcgcgccactgtaccccagcctgggaaacagcgaaaactccgtctcaaaaaaaaaaaaaaaaaaaaaaaggaagactttggatgtattaatgtgttagttttagagttccccttccctttaagggaatctgtgaccttcagtgacaaaggaagtggagtagctcactcgctggctgcatttggataaaaaagattaacgataactgtcttagttagaacccagttcccaacatagtgtcatacattttggaaaacaactcacagtacccgcacagaaccccggacattcaatcacggaatactcctgaacaacaaccaaaaaactatcataggaacagctcataacttatcaaaccaaacataagacacaacctgctataatacaacttcctaaaacccttttctttagacttttaaaaattcagtctccgtagagactgtcaaaaattgccaatgccgactatatttcaagtcgtcatggcggggtattgggaaaagttttcaattagcaataatcgcgcctcggataaacctcattggctacgatactgccactgcgcaaagctggaaaggttctgttcgcgccccgctcccccacggatgatgactaccattacattgagggtgagtgcctgcccgtgtgtccgtgtatacgacgtgttcccactccaccagccgtatttaaggcccatctgcataggaggtttcttgttgttggaacatcccgtgtcaaacattcaggttttgaaaaccataagaatattcgcttgggacgctggggaatcttatgcaaatcaacgtgacgtcacagagatgactcggttgagacttgaattttgagcgaggagagtgagcagtgggaaagcgagcctggagggcgcagacggacgactagctgtgctcgagggtgcggaaacagcagggtggggggagttgggaataattttaggacgtcactgtgacaaaatctgaatggagaacacggctgggcgcggtggctcacgcctgtaatcccagcactctgggaggccgaggcgggtggatcacgaggtcaggagttcaagaccagcctggacaagatggtgaaacggggtcgctactaaaaatacaaaaaaatcagcggggtgcggtgggcaggcgcctgtaatcccagctagtcgggaggctgaggcacgagaatcgcttgaacccgggcggcagtttgcagcgagccgagatcgcgccagtgcactccagcctgagcgacagacttcgtctcaaaaagaaaacaacagtgcgagagaaagaaaacaggacagccagctggcaagaaaagtcaacaccgccctgcatttaccttaaaagtagagatcacaaaatcagcaactccaactttcacaaacggaaatcgctaaacaggggttcggcaaagtttgcagcgagccgagatcacgccagtgcactccagcctgagcgacagacttcgtctcaaaaagaaaacagtgcgagaaagaaaacaggacagccaactggcaagaaaagtcaacaccgccctgcttttaccttaaaagtagagatcacaaaatcagcaactccaactttcataaacgcaaatcactaaaacaggtaaacttgcaggtgctctcgcgaatcagctggtaagacacttccccatctctcatttagagagtttgcgaacaagtactcttcaacctcccaaaaccaagcacccccacacacacaaaaaaagcctctgttgttcaactgcaagaaaattcagtctccgtagagactgtcaaaaattgccagtgccgactatattgcaagtcgtcacggcggggtattgggaaaagttttcaattagcaataatcgcgcctcggatagacctcattggctacgatactgccactgcgcaaagctaatttgttacgccccctgctcatcactcccaataagccagcttcctatttcgcaaaggtgagtttagggcctatggaaaaatcttcacttattgcttgcttgaaaattatacaatcatagaaagatgtttgtgacctgcgtaggtggtttctgcatatcgttgctgatttcacttagctaggtttttgttgatatgaagcaaagcactatgggaggaacatgctaatagacttaattcagagactgcgaagggcttttgagagaaaagggatcaaaatcagggttctgttcacttggctccagattcagtgtaacagacttctccaaagacgattattgttttgtcttttttctttttcaaacttttttttaaattatgccaaagtatacataaaatttaccattttaaccttaagtgtaaattcactggcatagaatatgttcacattgttgtgtaaccatcatcactacttacctccagaactttatctttcatgcccaagggtggaaactgagactctgtacccattaaacccttactccctgttcccttctcctccagcccccgtggcaacctcttttctactttctatctctatgactttgtgagtactttatatatatataaatggaatcatacaatatttgtccttgaggtcagtcttatttcattcagaataatgtttttaaggttcatccatgttgtagtatatatcaggaattcattaattttatggctgaataatatttcactgtatgagatgttatctttttttttttttttttttttttgagatggagtttttgctcttgttgcccaggctggagtgcagtggcatgatctcggctcattgcaaccactgcctcccggattcaagcgattctcctgcctccatctctcaagtagctgggattacagatgcatgccaccactctttgtatttttagtagagacaggatttcaccatgttggccaggctggtctcaaactcctgacctcacgtgatctgcctgcctcggcctcccaaagtgctggaattacaggtgtgagccacttcacccagcccatttattcttgtctatttttttttttgagacgaagttttgcttttgttgcccaggctggagcgcaatggcgagatcaacctccgcctcccaggttcaagcgattctcctgcctcagcctcccgaggagctgggattatttttagtagacacggggtttcaccatgttggtcaggctggtcttgaactcctggcctcaggtgatccacccgccttggtttcccaaagtgctgggattacagccgtgagccaccgcgcccggtcccattcattcttttttgagacagcttttggctctgtcgcccaggctggaatgcagtggcgcgatctcagctcacttcaacctctgcttccaggcctcaagtgatcctcctcccacttcagctggatactttctgtatttttcgtacagacaggatctcaccatgttgcccaggctggtctcgaactcctgggcccaagtgatcctcccatcttggcctcccaaagtgctgggactataggcatgagctgccgcccggaccaactgtttatcctttttttttttttttttgagggggagtctcgctctgttgcccaagctggagtacatagactcaatctcagcccatgcaacctccgcctctggggttcaagcagttctcctgtctcagcctcccgagtaactaactgggattacaggtgcgtgccaccaatcctggctaatttttgtatttttagtagagacagggtttcaccatgttggccaggctggtctcaagctcctgacctcaagtgatcctcctgcctcagcctcccaaagtgctgagccacggcgcccggcctatccatttatttttagatggtcattgctggtttccaccttttgtctatgggaataatgctgctattggtgtgcaaatatcagcttaagtttctgttttcctttttttttttttttgagactgagtttcgctcttgttgcgcagtctggactgcaaaggcgcgatctcagctcaccacaacctctgcctcctgggttcaggtgattctcctgcctcagcctcccaagtagctgggatgacaggtatgcgccaccatgcctggctaattttatatatatatatgtataaatatatatatatataaatttttttttttttttttttttagtagagacggggtttctccatgttggtcaggctggtcttgaactcctgacctcaagtgatctgcctgcctcggcctcccaaagtgctgggattacaggtgtgagccaccgcgcctggcccctgttttctattctttggtgtacatacctagaagtaaaattgctggatcatatgttaattcaaaagggtttggacaccttaattcaaaaagaggctcaaataataaggatttatttccacagaatgttcacagtttctaaaatttgaagcaactttcaccctcactgcctgttttccttcaggatgtagaaagctattagaaacctacatctggtctaggtgtggtggctcgagcgtgtaatcccaacgctttgggaggccaaggcaggtggatcacctgaggtcaggagttcaagatcagcctggcaacatggcgacatccctgtaaatacaaaatacaaaaatacaaaattacaaaaatacaaaatacaaaaattaacggggcgtggtggcgcttgcctgtaatcccagctactaggggggctgaggcaggaggatcgcttgaacctgggaggtagaggttgccatgagctgagatcatgccactgtaatccagcctgggtgacaaagcgagactccgtctcaaaaaaaaaaaaaaaaaaaaaaaaaaagaaagtaacatttcccccaacattttatcataaaaaattgtaaacacgaaaagttcaaagaattcctcagtgaacattcatgtactcatcatccatatacaaaaatgacattttttttttttgagacggagtctcgctctgtcgcccaggctggagtgcagtggcgcaatctcggctcactgcgagctccgccttccgggttcacgccattctcctgcctcagcctcccgagtagctgggactacaggcgcccgccaccacggcgggctaattttttctatttttagtagagatggggtttcaccgtgttagccaggatggtcaaaaacggcattttaaaaggcctgtttgatgctgatgtgttatgtgattatttctaacttgttttgtgtttttttttttgtttttttttttttgagacatgttctcagtcgcttaggttggagcgcaggggtgcaatcacggctcagtgcagcctaaatctcctgggctcaagcgatcttcccacctcagcctcccaggtagctgggactacaggcacacaccaccatgcccagctaatttttctgtattttttgtagatacagggtttcaccatgttgcccatgctggtctccagctcctgggctcaagtgatccgcccgcctcggcctccccaaggggagggattacaggcatgagccactgcagcagatttcttatttaattcacagcctggataaaaagaaaagactagcaatgtggtgaatttagattcttttactttgatcatccagtcaaggatttagtcattaattctggatggggtggagttgtgagaaaaacactaggccaggcacggtggctcacgcctgtaatcccagcactttgggaggccgaggcgggtggatcacaaggtcaggagttcaagaccagcctggccaagatggtgaaacctcgtctctactaaaaatacaaaaattagctgggcatggtggcgggcgcctataatcccagctacttgggaggctgacataggagaatcacttgaacccggtaggcggaggttgcagtgagcctagattgcgccactgcactccagcctgggcgatagagcgagactccgtctcaaaataaataaatacatacatacatacatacatacatacataaaataaaataaataaataatggggcttggtgtggtggctcacgcctgtaatcaaaaaaaaaaaaaaaaaaaaaaaaagagagagagaaaaagactaaagccctaatcctaatcccatgagggtatcaaaggaacttcctagcccttgagaattctagaatgggtggcccattacactctctcagtagctatcaagtgaaattgtgtgtttcaccagctgacttggatgacaaaaaaaaaaagaaatagaaacaaagcatacaaaaattaaaaaagaaagaaagaaagaaagaaaaaacaaaacaaaacaaaaaagacttggatgacttcaccgtccagggatgattttccagcactatgagaaaaattgaaaactcagctaacttttcctcagagcatgagatttttgggggcctagaagcacaatagaattcccaaccaatctctattagtgatgatcattccacttggagaactgaaaaaataacctaggtttgaactttttcatagtaaaattggtgaatggggaaggagaatgtcactgttctcacatttttaaaagttatgatcaaatacccagaaaatgtgtgcagaaaatgtgctggattataatttttaaattttgggggggattataatttttttgacaacgaaaatttcagtctagcttctggtgctttctttcagcagatgtggtcaggttaactaatgcagaaagggctgtcagtggctggagtgcagtcacaggatcatggctcactgcagccttgaaaaaaaaagggggtggccgggcgcagtggctcacacctgtaatcccagatactggggaggctgaggcaggagaatcacttgaacccgggaggcggaggttgcggtgagccaagatggcgccattgcactccagcctggtcaacaagagtgaaactccatctcaaaaaaaaaaaaaaaaaaaaaaaaaaggagggggctgtcatatgagtttccccgcctagtagatcctacagctactgactttcgctgttgctggagctactactccctgtgtactaagttaaaaagaatcggccaggcgcagtagctcacgcccgtaatcacaacactttggaaagcctagagcccaggagttcgagaccagcctgggcaacatggtgaaaccccgtctctacaaaaaaatacaaaaattagctgggcttggtggcccacctgtagtcccagctactcaggaggctgaggtgggaggatggtttgagtccaagaggttgaggctgtagtgcgcagtgatcgtgcctctgaactcccgcctgggtgaaagagtgagaccatgtccccaaaataaaaaaataagcttttaaataattaaagtggcagggcgcagtggctcatgcctgtaattccagcactttgggaggctgaggcgggcggatcgcgaggtcaggagttcgagaccatgctgacaagcatggtgaaaccccgtctctactaaaaatacaaaaattagccgggcatggtggcgggcacccgtaatcccagctactcgggaggctgaggcaggagaatcacttgaacccgggaggcggaggttgcagtgatctgagatcgtgccactgcactccagcctgggcacagagcaatattccgtctcaaaaaataaataaataaataaataaataaataaataaataaatagccgggcgcggtggctcacgcctgtaatcccagtactttgggaggctgaggcgggcggatcacgaggtcaagagatagagaccatcctggctaacacggtgaaaccccgtctctactaaaaaaaaaatacaaaaaattagccgggtgtggtggcgggcgcctgtagtccggaggctgaggcaggagaatcgcgtgaacccgggaggcggagcttgtagtgggccgagatctctccactacactccagcctgggcgacagagcgagactccgtctcaaaaataaataaataaataaataaatatcaataataataataataaaagtggcggggtgcagtggctcactcctgtaatcctagcattttaggagactgaggcaggtgggtcacctgaggtcacgagttcaaaaccagcctggccaacatgacgaaaccccatctctactaaaaatacaaaaattagccgggcgcagtggcgagcgcctgtaatcctagctactccggaggccgaggcagcagaatcacttcagccgggaaggcagaggcttcagtgagtgaagatcgcgccactgcactccagcctgggcaacagagctagactctctcaaaaaaaaaaaaaaaaattaaagttagttttacttacaagtcttactgaggattacagaccgagggctatagtgtgggagcagttccatcagactggtccaacacagaatttcagccactcatatacaagtggtgagtgtacggcgcctgcaaaatcacattaaacttgcttcaaagttacattaaagcacaatcatatcaaagtttgggtgcaagagtatatctggttatggattacagaggtatcatcactaaccccatcagacattatcttgtgcaggaaaaggcaatgaccagagtcatttatcttttaatgaatatagtgacttggaagagacatggagggctgtgtgctctattctgttttgtcttcaaagcatctttctggagagctgtatgttgtcacagagtcaggggcttcatgaaacgatgctgccaagtcgaaataagcaggcccggcatggtggctcacacctgtaatcccagcactttgggaggccaaagcaagagctttccttgagttcaggagtttgagaccagcctgagcaacatagtgagaccgtgtctcgacaaaaataaaaaataacaaaatttagctgggcgtggtggtggatgcctgtgatctcagctactcgagaggatgaggttggaggatcccttgggcctgggaagtagaaactgcagtgagctgtgatgtcacaactgcactccagcctgggtgacagaacgagaccctgtctcaaaaaaaagaaaaaaaaaaagcagaaatgggcaaactactaaatggtcattttgccaatattacctccaaagatacaatgatagaaccaaaaacctaaaaactctttctcaagcttccacattacttctctgcacttcagttcatctttatttattattattattttttgaagagatgggatctcactttgtcacccaggctgaagtgcagtcgcacaattatggctcactgcagcctcgatctcctgggctcaaagtgatcctcccacctgagcctcttgagtagctgggactacaggcacacaccaccacaccccgctaattttgtttattttttgtagtgagtgggtctcactatgttgcccaagctggtcttgaacttttgggctcaagtgatcctcctgccttggcctcccaaagtgttggtattacaggtgggaaccactgcactcagcccaattcatcttaaaatgggggaagggagtccttaggtggtcttcaaggtccctgctggccgcccacctttatgtccaaagacacttatacatttattgatttaggtgatgctgcagagcggcagttctggttgtctacacattaggaacaattaggaaatttgtagatcagaatccctgggagtgagacgcaggccttgtttgattaacttaataaaaaaaatatgataaataaaattggagaagccaagcaggttaagtacattagtccaggtataatatatttggcttcatattaactgtaaaaacatcacttttggctgggcacagtggcttacgcctgtaatcccagtactttgggaggctagggtgggcagatcacgaggtcaggagatcaagaccatcctggctaacatggtgaaaccttgtctctactaaaaataaaaaaattaaccgggcgtagtggcatgcgcccataatccctgctactcaggaggctgaggcaggagaattgcttgaacccgggaggcggaggttgcagtgagccgaaatggcaccattgcactccagcctgggcaacagagcgagactccgtctcaaaaacaaacaaacaaacaacaacaacaacaacaacaaactatcactttttcagatatgtataaacacatttcttcacaagttcaaggtattttaccaatagcaaataacttgatactgtcgttgtgaatgaaaaggatcacaaactctgatgtttagaatgagtcaaatctaggccgggaacagtggctcaggcctgtaatcccagcattttggggggccgaggttggcggatcacctgaggtcgggagttcgagaccagcctggccaacatggtgaaactctgtctctactaaaaatacaaaaactttaaaaaaaagtcaaatctagatccatgattaatgacgtgctcatttcacattgcatgtttgtatcaaaacatctcatgtgggtaaagcatagacaggcacagagaaaagaaaaaaagacaaaaaataagagaaaagatggccgggcgcagtggctcacgcctataatcccagcactttgggaggtcaaggcgtgcggatcacctgaggttaggagttcaagacgagcctggccaacatggcgaaacccccgtctctactaaaaatacaaaaataatcccagctactcgggaggctgaggcaggagaatcggttgaacccgggagagggaggttgcagtgagccgagatcgtgccactgcactccagactggagttttttcaaaaaaaaaaaacaacaactccgtcttaaaaaaaaaaaagaaaaaagaaaaaaaatcttatgtacactataaatatatacacctactaagtgcccacagaaattgaaaacaaagaaaaaaatccatgattaaaagcttttatattaacgggggaacctctgaccagaaagagccgacagggggcgttcctggatgatctggggctgtcaattgcgagacgcggaggattgtgggacttgtggtttttctcgcatcatttaagctttctggactacatgtcccaaaatgcaaatgcaatcagacggtcccactgtggggtgtgaagtgtccgtagagctgtgagaggtaagtgtgttctgtgtgtgctgcggatttctagaagttgtggatttcttgtgagggattctatttctcctctttgccctcggtgggacctggaagagagtagttgttccactgatgcacgttttcagcgggggtttcccctgaccctttggtctcgggaaaccggactgtgtgtttgttcagctgttcacgttttgctgtggaatgtcaaggagaaagcggggtcctgatctcagatctggaaagccaaacataaaataatgtttacatacggggtgcatgtcactagaggatttatgcattgcattgtgtcaaataatatgtcaaagttttttctttttctttttttttttttttttgatacggagtcttgcttcttcgcccaggctggagtgcaacggcgcgatctcggctcactgcaacctccgcctcccgggttcaagcaattctcctgcctcagcctccctagtagctgggattacgggcacgtgccacaatgcccggctaattttttttgtatttttagtagagtcggggtttcaccatgttggccaggcatgtctcgaactcctgatctcaagtgatctgcctgcgtcggcctcccaaagtgctgggatttcagacgtgagccaccgcacccggccctctattgttacagctagaaaagctgacgggcaggggtcttgtctctctgatgtgtccaagtagcagagcttgcagtggagggtaaactaaaataagggggaaatgaaaaaataaaaggaatgcgtgtgtgtgcttaattacatgaacaaaatcaaacaaaacctgactcattagggccagactcagaggctcacacctgtaattccagcacgttgggaggccgaggcgggcagatcactagagctcaggagttcgagactagcctggccaacatggtgaaaccctgcctctactaaaaatacaataattagccgggcatggtggccatgtagtcccagctattctggaggctgaggcaggagaatcacttgaacccgggaggcggcggttacagtgagccaagatcatgccactgtactctagcctgggcaacagagggagactctgtctcaaaaaacaaaacgaaaacaaacaaacaaaaaatgagaaaaaaaaaaaaccaccccagtttctcacatgaggcttctttttctctagaatgaagatgagctttgcgttgactttcaggtcagcaaaaggccgttggatcgcaaaccccagccagccgtgctcgaaagcctccattgggttatttgtgccagcaagtcctcctctggaccctgagaaggtcaaagagttacagcgcttcatcaccctttccaagagactccttgtgatgactggggcaggaatctccaccgaatcggggataccagactacaggtcagaaaaagtggggctttatgcccgcactgaccgcaggcccatccagcatggtgattttgtccggagtgccccaatccgccagcggtactgggcgagaaacttcgtaggctggcctcaattctcctcccaccagcctaaccctgcacactgggctttgagcacctgggagaaactcggaaagctgtactggttggtgacccaaaatgtggatgctttgcacaccaaggcggggagtcggcgcctgacagagctccacggatgcatggacaggtgcaggagctgtacacggtttgaacgcaaacccgtgtgttgttttgggagagtagggaccttggctgtcttgatcaccacagtcttagaccttgagaaaaggatttcagagcaagttgtttattttgcagttgattccagtaaattcattgacggagcaaggatgtaaaacaggaaagagaggaaagccaagaaagtgtgtgttaatgagtgggttactgccttgggcactggggttcagtcctgtgagggaccctccaactgtctaggacatgcctgaggattgtctcaatgaaacttgaggactggggccgggcgcagtggctcacgcctgtaatcccagcattttgggaggctgaggtgggcagatcacatgagctcaggagttcgagaccagcctggccaacatggtgaaaccccatttctactaaaaatacaaaaattagccggtcgtggtggcacatgcctgtaatcccagctgcttgggaggctgaggcaggaaaatctcttgggaggcagaggttgctgcagtgagccgagattgcaccactacactccagcctgggcaacagtgcaaaaaaaaagaaaaaaagaaaaaaaaaagttgaggatggtgcacagtggctcatacctgtaatcctagcactttggaaggctgaggcaggaagattgcttgaggctaacagttcaggaccaacctggcaaacacagtgagactctgtctctatataagtaaagtaaattttatatatatatatatatatacatatatatatattttttttttttttttttttttttaaagaaagttgaggccgggtgtggtggctcacgcctgtaatcccagcactttgggaggccaaggcaggcagattacctgaggtcaggagttcaagaccaatctggtcaacatggtgaaaccccgtctctactaaaaatacaaaaatctgttggaagtggtggcacgcacctgtaattccagctactcaggaggctgaggcaggagaatcgcttgaacctgggaggtagaggttgcagtgagctgagatcatgagctgagatcatgccaccacaccccagcctgggcaacagagcaaaactccgtctcaaaaagaaaaaaaaaaaagaaagttgagcaagctagggtgattttcttttattttcttttgtgtttgtgtgtgcacgtgtgtgtgtgtgtgtgtgtgtgtgtatgacaggctttcactctgtcacacagactgggatgtggtggtgtgattatagctcacttcagcctcaatctcttgggctcaagtgatcctttcaccccagcctcctaagtagctgggactacaggcaaacgccaccgtgcccagctaatttttaatttaatttttattttttgtagagacgaagtcttactatgttgcccaggctggtctcgaactcctgggctcatgtgatcctcctgccttggcatctcaaagtgctgggatgactagtgtgagccactgtgcttggccttgaagctagggtatttattcaccatctctcatccctcatgggtccaggatcactctaggggaattaattccctaacattttgactctgctcctcccaaggaggcttccgtgggcagagaacatctgaggcaagagagacacaggaaactgcttgtaagaaaattgtgtaggctgggcgcggcggctcacgcctgtaatcccaacactttgggaggctgaggcaggcggatcacgaggtcagttgatcgagaccatcctggctaacatggtgaaaccccgtctctactaaaaatacaaaaaattagctgggcgcggtggcggacgcctgtagtcccagctactcgggaggctgaggcaggagaatggcgtgaacctgggaggtggagcttgtggtgagccgagatcgcgccactgcactccagcctgggtgacagagcgagactccgtctcaaaaaaaaaaaaaaaagaaagaaagaaaattgtgtccaccagggtgctgtggttcatatctgtcatcccagcaactcaggaggctgaagcaggaggattacttgaggccaggagatcaagacctgcctgggtaacacagccagactccgtctctacaaaaaatttttttaagaaaggaaattggctgggcacggtggctcgcgcctgtaatcccagcactttgggaggctgagttgggcggatcacctgaggtcaggagttcgagaccagcctgaccaacatggagaaaccctgtctctactaaaaatacaaaattagctgggcgtggtggtgcatgcctgtaatcctagcgactcgggaggcttagacaggagaatagcttgaacccaagaggcggaggttgcggtgagccgagattgtgccattgtactccagcctgcagcctgggcaacaagaacaaaactccgtcaaaaaaaaaaaacaaacaaaaaaacagagaaaggaaactgggacgggtgcggtggctcatgcttgtaatcccagcactttgggaggcagaggcaggcagatcacttgaggtcaggagttcgagaccatcctggcccacacggtgaaaccccatctctactaaaaatacaaaaaattacctgggcatagtggcgcacgcctgtagtctcagctatttgggaggctgaggcacgagagtcgcctgaacctgggaggcagaggttgcagtgagccaagattgtgccactgcactccagcctggacaacagagtgagactctatctcaataaaaaaacaaaaagaaaggaaactgttcgaacgtggcctttagcatgttctgaggaaaatatgagctgaacaccaatagcatgtgctataaactgctgggtttccaatgcctaggatggctagatacatagaccataacgtagccgggcagtagtcagaactcaatcaataatgagggaacagatacatgggagggtatcatgcttatgggtctggcaataattgtagctaattggagacttatttctttaagccctagagaggctcctctgagggctgaagtcagtctgccaatgctgaaatatttactgggtgcctagaatgtatggtgtacatacgttacactatgtagtacattataacactaactactgtgcttcttagtggtcagaaccaaagtataggctgggctcagtggctcacacctataatcccagcattttgagaggctgagggggcggatcacttgagctcaggagtttgagaccagcctggccaatatgtcgaaacccagtctctactaaaaataaaagattggccaggcgtggtggcgggcgcctatagtcccagctactcgggaggctgaggcaggagaattgcatgaacatgggtggcagaggttgcagtgagccaagatcgtgccattgcactccagcctgggcgacagagggagattgtctcaaacaacaaacaaaaaccaaagtataaaacatggcccactttatatgcaagaactttgtaatatttgggaagacacaaaaataacataattggccgggcacggtggctcacgcctgtaatccgagcactttgggaggccgaggcaggggatcacctgaggtcaggagttcaagaccagcctgaccaacacagtgaaaccctgtctctactaaaaatacaaaattagccaggcatggtggtgcatgcctataatcccagctactcaggaggctgagacaggagaatcatttgaacccgggaggcagaggttgtaatgagctgaaatcgcaccattgcactccagcctgggcaacaagaacgaaactccttctcaaaaaacaaccaagcaaacaaacaaagaaaagcacataattaatgataaatgacaacgcatgattgtgaaattgtgtggttcttgatttatatgctgtgcatgttcaaataaacagatttagtaaagattggaataatcagttgagaaagctttttaaaaaaaaaatttttttttttaaatagagacaggatcttgctgtgttgcctagtctggtctcgaactcctaagctcaagccctcctcctgccttgatcttccaaagtgttgggattacaggtgtgagccaccatgcctggcccaagaaagctttttttttttttttttttttgaaacacagtcttgttcttgttgcccaggctggagtgcagtggcacggtctcggctcactgcaacctccgcctcctgggttcaagtgattctcctgcctcagcctcccaagtagttgggattacaggtgcctgccaccacccccagctaattttttgtatttgtagtagaggtagggtttcatcatgttggccaggctggtctcgaactcactcctgacctcgtgatccgcctgcctcggcctcccaaagcgctgggattacaggcgtgagccacagcgcctgccccaagaaagcttttatgggtacagggggcttgagattggctcaggtttgtctaggcaagagcgggaaacagggctttccaaatgaagggaagttgtagatcccagaggagtctggcctggcctctgtagaggtttggacctgggacttgcagaaaccagattgtctgggaaagttaggcccaaatcatggttacatttgaaaatcaggcagtgcagttgggtctgctgtgagacaccaaaggggtttattagtggtttctgagcaagcaagcaacatgataaaaatagcatttgaggaaggctaaacaggattaaaaagagcaggtcagggaggtcagcctgaaagacctagactaaggtggtatccagggaatttgagttaatgatgcttatggattcattaaaacaattttttccgccgggcgtggtggctcatgcctgtcatctcagcactttgggatgccgaagcgggtggataacctgaggtcgggagtcaagaccagcctgaccaacatggagaaaccctgtcactactaaaagtacaagaacaacaaaaaattagccgggcatggtggcacatgcctgtaatcccagctactcgggaggctgaggcaggagaatcgcttgaacctgggaggcggaggttgcggtgagccaagactgttgtgccattgccctccagcctgggcgacaagagtgaaactctgtctcaaaaaaaactcacaatttttttcatgaagaaaatctgttcttttaataatgaaaatttcaaacttcacaaaagtaaagagaattgtataatgaattctcatataccatcacccagattccaaggttttatcaagattttgtcatgtctactttatccattctgtctcttcttaagcattttaaaacaatccaggacttcttgacatttcacaggggcctttttttcttttcttttttttttttttttgagacagagtctcactctgtcgcctaggctggagagcagtggtgagatcttggctcactgcaacctccacctcccgggttcaaccgattctcctgcctcagcctcctgagtagctgggattacaggcatgcaccaccatgcccggctaatttttgtatttttggtagagactgggtttcaccgtgttgggccaggctggtctcaaactcctgacctcaggtgatctgcctgccttggcctcccaaagtgctgggattacaggcatgagccactgtgcccgctttctttttttttttttttttttgagatgaagtcttgctctgtcacctaggctggagtacaatggcatgatcttggctcactgtaacctctacatcctgggttcaagcaattctcctgtctcaacctcctgagtagctggaattacaggtgtgcaccaccacacccggctaatttttttgtatttttgtagagacagggtatcaccatgttggccaggcgggtctcaaactcctgacctcaactgatccacccatcttggcctcccaaattgctgggattacaggtgtgagtcaccgtgcccggcctggcctttttttcttttttagacagggtctggttctgacacccaggctagagtgcaatggtgccatcataactccctgtaacctagaactcctgggtaattagaactccagctaattaaaaaattttttttggctaggcgtggtggctcacgtctgtagtctcagcactttgggaggccgaggtgggcagatcacaaaaattagctgggcgtggtggcaggcgcctgtaatcccagctgctcgggaggctgaggcaggagaatcgcttaagcccaggaggcggaggttgcagtgagccgagatcgcgccattgcactccagcctgggcgacagagcaagaccccgtctcaaaaaacaaagacaagccaaaaaaattttttttgtagagagagcgtcttgctgtctacccagactggtctggaactcctgagctcaagcgattctcttgctttacgctcccaaagtgctgggattacaaggtgtgagccaccatgcctggccacaggggttcttttaagagaagaaaatcaacataatctgatggctgactagaactaaaaggagaaaaatgaggctggttgtggtggctcacacctgtagtcccagcactttggaagactaaggcaggaggattgcttgagcctaggagttcgaggctgcagtgagctatgatcatgccactgcactccaggtaagagccaccacgcctggccaagaccctgtctcttttttttttttgagacggagtctcgctcgttgcccaggctggagtgcagtggtgctatctcggctcactgcaagctccgcctcccgggttcacgccattctcctgcctcagcctcccgagtagctgggactacaggcgcccgccaccacggccggctaattttttgtatttttagtagagatggggtttcaccgtgttagccaggatggtctcgatctcctgacctcgtgatccgcccgcctcggcctcccaaagtgttgggattacaggcgtgagccaccacgcccagcctgaccctgtctcttaaaaaaaaaaaaaaaaaaaaaaaaaataggccgggcgcagtggctcatgcctgtaatcccagcattttgggaggccaaggcgggcagaccacctgaggtcaagagttcgagaccagcctcaacatggagaaaccccgtctctactaaaaatacaaaattagccgggcgtggtggtgcatgcctgtaatcccagctactcgggaggctgaggcaggagaattgcttgaacctgggaggcagaggttgcggtgagccaagatcgcgccattgcactccagcctgggcaacaagagtgaaactccgtctcaaaaaaataaaaaataaaataaaaaaataaaaacagacacaaagtgctctccctcactggctcaagctctggtgattggagaggtgagaaggggggccaggtgcagtggctcacacctgtaatcccagcactttgggaggccaaggcaggcggatcacctgaggtcgggagtttgagaccagccttaccaacatggagaaaccccgtctctactaaaaatacaaaaaaaattagtcgggtgtggtagagcctgcctgtaatcccggctactcaggaggctgaggcaggagaatcgcttgagaccaggaggtggaggttgcggtgagccaagatcatgccattgcactccaacctgggcaatgagagtgaaacttgctctcaaaaaaaaaaaaaaaaaaaaaaaaaagaggtgagaagagaaccaggagacactgtgtcctggaaaccaagaaggagaagcattttagaaggaatggtaatagacagtggcaaattcagcagatgagcaagggaaagtatagagggaaaaacgcaggtttgggcattaaggaaatcagcaggcaaggcatttgcagtcatgttaaggataaaagtgagctatagcagaaggttaggaaggagtgtataggaaggaaattgatgggctgggcgcagtggctcacacctgtaatcccagcactttgggaggccaaggagggaggatcacttgaggccaggagtttgagaccagcctgggcgacacagtgaaacaccgtctctaccaaaactacaaaaattagctgggcgagatggcgcgtgtttgtagtgcagtccctgccactcaggaggatgaggtgggaggataacctgagcccaggaggttgaggctgcagtgagctgagatcgtgccactgcattccagcctgggcaacagccagaccctgtctccaaaaataaaaaaaataaaatagaaagtatggctaaaatggggtggggattgtgtgttagggaaagaaagcagcgatggaagggctgaaaatggttggagatgaaacgtctctgacagctttgtgcctcccaagggcatactgttcagtcggcgtcttccttggttccagggtcctgtgcttggattgtggggaacagactccccggggggtgctgcaagagcgtttccaagtcctgaaccccacctggagtgctgaggcccatggcctggctcctgatggtgacgtctttctctcagaggagcaagtccggagctttcaggtcccaacctgcgttcaatgtggaggccatctgaaaccagatgtcgttttcttcggggacacagtgaaccctgacaaggttgattttgtgcacaagcgtgtaaaagaagccgactccctcttggtggtgggatcatccttgcaggtatctgacttggcaagagtggtaaccaccccttgtgcgggattgggagtcctggagagacaccctgtttggtttaactttttctagatctagagaacctagacattcttatgtgtgtcttttctccgtgcaggtatactctggttacaggtttatcctcactgcctgggagaagaagctcccgattgcaatactgaacattgggcccacacggtcggatgacttggcgtgtctgaaactgaattctcgttgtggagagttgctgcctttgatagacccatgctgaccacagcctgatattccagaacctggaacagggactttcacttgaatcttgctgctaaatgtaaatgccttctcaaatgacagattccagttcccattcaacagagtagggtgcactgacaaagtatagaaggttctaggtatcttaatgtgtggatattcttaattaaaactcattttttttaaataaaaaattgttcagctttatatgaaatgcttcatgaatttgtgtgtcattcttgcacaggggtcatactaacctctgtatcattccaattttagtatatgtgctgctgaagagagcactaaaactaatttttttttttttttgagacaggatctggctctgtcacccaggccgaagtgcaatggcctgacctcagctcactgcaacttctgcctgccaggttcaagccatcctcccacctctgcctcccaagtagctaggactacaggcgtgcaccaccatacccaactaattgtttttattttttgtagagacagggtctcactttgtcacccaggctggtctcgaagtcctgagctcaagctctccacccgcctcagcctcccaaagtgctgactttataggcacgagctaccacacccggccaaaacttttttttttgagacagtctcgctctgttgcccaggctggagtgcagtggtgtgatcttggctcactgcatcctctgcctcctggattcaagtgattctcctgcctcagcctcccaagtagctgagattacaggcacgtaccactacacctggctaattttttatagttttggtagagacgaggtttcaccatattggccaagctggtctcaaactcctgacctcaagtgatctgcctgccttggcctcccaaagtgctgggattacaggcgtgaaccaccgtgcccgggtgttttgttttgttttgttttgtctttgagatggagtctcgctctgtagcccaggctagagtgcagtggcatgatcttggctcactgcaacctctgcctcccagattcaagcaattctcctggctcagcctcccgagtagctgggactacaggtgcccaccaccatgcccggctaatttttgtattttcagttcaccatgttggccaggctggtcttgaactcctggcctcaagtgatccacctgccttagcctccaaaagtgctgggattacaggcatgagccaccaagcccggccagtggtcatctttccatgtcctaagtgctatggtattgtgactgataggctgatgttcacaagcattccctggaccctgctcttcgtttatctttgcattcacttgtttcatttctttacagatccctaaggagcatccgttttttctcaaactaatcaaagctcgctgagtgcagcctgtagggggcaacaaatcaacacctctctgccagcccatttctcaacccggcagctttcccagccaaagagttaaggtctaggctgaggagatttgccccagaacaaagactttttcaaagaagcagctgcattcatttcctttttatctcacctggcaggagaaatggcctgggacatatgtaggccagagtggtctctggagcgccaacccaaggatctcactaattttgtggggtaagggtagaaggaaatgactaaatttataatccaaatggttaagtgtctttaactgaaccattttgatataatttttgaaaaaataagcaatggccatgaattaattttttataaccaagagataaaggaatctttcaaaaatagcacagcagctgggcgtggtggctcaagcctgtaatctcagcactttgggaggccaaagcgggcggatcacgaggtcatgagatcgagaccatcctggctaacacggtgaaaccccgtttctattaaaaatacaaaaaaatgggccaggcacagtggctcacttctgtaatcccagcactttgggaggccaagacaggcagatcacgaggtcaggagatcgagaccatcctggctaacacgatgaaaccccttccctactaaaaatacaaaaaaattagctgggcgtggtggcgggtgcctgtagtcccagctactggggagactgaggcaggagaatggcgtgaacctgggaggcggagcttgcagtgagccgagatcttgccactgcactccagcttgggcgacagagcgagactcaaaaaacaaacaaacaaacaaaattagccaggcgtcgtggcaggcgcctatcgttccagctacttgggaggctgaggcaggagaacggtgtgaacccgggaggcggagcttgcagtgagctgacatcgcgccactgcactccagcttgggcgacagagcaagactccgtctcaaaaaaaataaaaataaaaaataaaaaataaaaatagcacaccagggccaggcacagcggctcacgcctgtaatccctgcactttgggaggcataggcgggtggatcacaaggtcaggagatggagaccatcctggccaacatgatgaaaccccgtctctactaaaaatacaaaaattagccaggcatggtgggatgtgcttgtagtcccagctactcaggaggctgacgcaggagaatcgcttgaaccagggaggcggaggttgcagtgagccgagattgtgccactgaacggcctgggtgaaagagaaagactctgtctcaaaaacaaaacaaaacaaaacaaaaaaaccacactaggtatgtggattgtatgtttatatatttaattatatatatatatatttttgagacggagtctcgctctttctcttttgcccaggctggagtgcagtggcgcaatcttggctcactgcaagctctgcctcctgggttcatgggactacgggcgccagccaccacgcccagctaacttttttgtatttttaatagagacggggtttcgctgtgttagccaggatggtcttgatctcctgacctcgtgatccacccgcctcagcctcccaaagtgtacctgtttgtcttttttaaaaaagattgcaaatgaggctcggtgggaggccgaggtgggcagatcacctgaggtcaggagttccagactagcctggccaacatggtgaaaactgtctctactgaaaatacaaaaattagccgggcgtagtggccagtgcctgtaaccccagctactcgggaggctgaggctgaagaatcgcttgagcagaggaggcagaggctgcagtgagccaaggtcatgccactgcactctggcccgggcgatagagcaagactccgtctcaaaaaaaaaattatatagacacatatatatacataaaataataataataggcccggcacggtggcttatgtgagtctgtaatcccagcactttggagggctgaggcgggtggatcacccgaagtcaggagttcgaaaccagccagcctgaccaacatggtgaaaccctgcctctactaaaaatacagaattagctgggcatggtagccggcgcctgtaatcccagctacttgggaggccgaggcaggagaatcgcttgaacctgggaggcggaggttgcagtgagctgagatagcatcattgcactccagcctgggcaacaagagcaaaactccgtctcaaaaaataaaataaaataaaaataatagtaataaaaagtaaaaaaatagaaaaagattacaaatcaaggcttgcttaatgtaataaagactttctcaagaaaaattaaagtgcattatcctttcctctccttccccttaggaaaacagtatttatcgaacatttactatacaacaagcacttaggaagcatttacacaacatatttggacacttaattcccacaaccctatgataagagcactattatttcgggtaacctgcccaaggtcaccaagagggtgactaggccaggaatgaaggccagtctgtccagttctgagttcgctctcggactttctgctgtagaaacccggtggggtaacagcagctgtacctgcggaagaaggacaaagctcaagaaacttccagaagtgacccaggctgggttctgaaagatgaacatgccttcacgaggtaggaaaagggaggaaaccactcatgcaaaaagcatggctgttacaccaccaaatctcttcggttttttttttcccttcaatgtgggggtggaaatttaagtgtagatttggggcgcctcagaggcctgtggctcgcccaacatccccttgcctctctgcttggccacctctcctctcagctcccctttgttccctgcaccccactttccctaccccctaatccgtccccgggataaaagcaatgcaggcgatgcccacaggaaaccggcaggaggagctgggtgacagggaagagcgacccggagagtcacatccacgtgagttcgccctcttttcacactctagcgcccattctgtccttcctgctggattctggctcaggagaagagcgccgccaggaccccaggaagctgcagacaggagccgctgacacctccacctcacgcggacgccacctagtgtgaccattaccagccactgcgcctgcgcagactcgggttttctgtgcgcgccagaggggcggggcctgggccgggaaggggcagaagtagaccgacggctgggccgccattcaccaatagaaaagagagatcgagagccacgtgctcataagatatccaatcacaatcacatcctgtggcggcggattggggggcgtggactagaggttgatcgggttgggcacacagcatcacgtgacacgaaaaggtaaataaggccacgtggctttttctccttggcttcggcgaaacattacgtcacactaccgtctctgaacaattatttaatgaacttatgtgatgcgctagacaatgtgaagacaatgcggttgctagaaattgtaatctctccatcaaattactctgtccagcttatttccttgtttcttcattcaaatcatcctagacattcaactagttttccgtatcctactttcatacaaatgctcatttaaagataattaagggaatttattctctctttcccaagccttgataatgaaaaagaggtaggttattttgttgttggttttttgttttcttttttcttttttttttttttttgagacagggtctcattctatcacccaggccagagtgcagtctcactgcagcctcaaccttctgggctcaggtgatactcccatctcagcctcccgagtagctgggactacagccatgcaacaccttgctgattttttgtagagacgggatttcaccgtgttgtccaggctggactcaagcaagcctcagcttctcaaagtgctgggatttacaggcctgagctaccacgcccggcccaagagagatttttacatcagaggatatctttagagcctttagtagccctgtgactgctctctctctctcgtttgttctgtcatctaaataaataaataaataaataagaagaagtaagcaccattttcctaaaagcccacttttcttccatccaacagggacttgcaatttctttccactgaagaaatattttttatggccttcacagttcgttgaagattaaggccaggtctaacttgattttgcatcccttgaaattcttcatagcacaatatgcaaagaagggttcttcggtttatgcttgttgaatttgaatttgagaatagtcccattcttgcctgccaaagaattaaaaagacttaaaaagaattaattttaattaaaaagaattaaaaagatagcacttctctgaattatctggatttgggttccaaggtcagctatgccacccaggaattagtgacttttggcaatccattgcatctttaagccagtttcctcatccatcagatgtggatataacagtacctacaactatagaacttcaaggatgacaagataattgtgcaaaagacatgacaccgtctggagcatacagcataatatatacaaggatgccagtttgaagagtagggaagaaagtctcagagcagactgaattgtagacagatactaacactaaatcattgtcttgtggccagccccgaatacattgtatcctcagcattttgtgtggtgcctggcccagagtaagtgttcaataaataatcattgaatggatgaataaaatgagggaccgggcgtggtggctcacgcctgtaatcccagcactttgggaggccaagtcgggcagatcacgaggtcaggagatcgagaacatcctggccaacatagtgaaaccctgtctctaaaatacaaaaaattagctgggcgtggtggtgcgtgcctatagtcccagctactcaggaggctgaggcaggggaatctcttgaacccgggaggcagaggttacagtgagccgagattgcgccactacactccagcctggtgacagagtgagaatctgtctcaaaaaaaaaattataaataaataaataaatgagggagaaattatgccaaaagataagtccacacacactcccttcttcaaatggaaggtcttctattgcccaccacatacccagaaatggtggctgttctgtcagtttccagtggtctgaaactgcttaatggtgccttttgatagtggacagagtctcactgtgtcacccaggctggagtgcagtggtgttatcttggctcactgcaacctcttcctcccaggttcaagtgattcttctgtctcagcctcctgagtagctgggattacaggtgcacgctaccatgcccagctaaattttgtattttttagtagagatgaggttttgccatgttggccaggctggtctcgaactcctgacctgaggtgatctgccctcttcggcttcccaaagtactgggattacaggcgtgagccaccatgcctggcctcaactttgcttttctgcttcagttcccttctctgcctctccccacttgctctggtgaatttcttttttttttttctttctttggccgagtatcactctgtcacccacgctggagtgcagtggtgtgatctcagctcactacaacctcagcctccctggtttaagccattctcctgcgtcagcctcctgagtagttgggattacaggcctatgccaccatactcggctaatttttgtattttttagtagagacagggttttgccatgttggccaggctggtctcaaactcctggcctcaagtgatctgcccacctagacttctcaaagtcctgggattacaggcgtgagccactgtccctggcttagttctggtgaatttcaatgtaaatgtagtcataaatactcatagaggaattgggctgaagtgacttagtggttaaaagcttgggcactgccaccagacagacctggccaaatcctgattttgccatttgtgtgatcttggacaaatgacttaacttctctgaatttttagttccacatccatgaaatgggagcaaaaatatcaatatcacagagctggtttgaacatttaatgagatgagatgtggaaaactccgaacaaggaagtatgcagtaagtgctccagaaatgcaagctgttattggttttttgttttgttttgttttgttttgttttgttttgtttgtgttttgtgtgtgtgtttgtttgagatagtgtctctctctgtcactcaggctggagtgcagtggcgtgatcacagctcactgcagcctccaactcctgggctcaggggatccttccacttcagcctccctagtagcttgaaacagggtctcactctttcacccaggctggagtgcagtggtgtgatcatagctcactgcagcctcaaactcccgggatcaagagatcctcctgcctcagcctcttgagtagctacgatcataggcgcgtgccgccatgctcggcttgttaatgtttattatatttcatgactacagtgtcaaaattagcctgtagagtgtggtgaagtcttttatttagaaaagaaagtcgtggccgtgtgcggtggctcacgcctgtaatcccagcactttgggaggccgaggcgggcggatcacgaggtcaggagatcgagaccatcctggctaacacggtgaaaccccgtctctactgaaaatacaaaaaattagctgggcgtggtggcaggagcctgtaaacccagctactcgggaagctgaggcaggagaatggcgtgaacctgggaggcagagcttgcagtgagccgagattgcagcactgcactccagcctgggcgacagagcgagactccatctcaaaaaaaaaaaaaaaagaaagtcattgtagaaaaatggtttaatacagttgaaaatggaggcagaatcatgagacgggggcaaggtctggctcaaactaaagcctaccacttcaggcagggaagggcagtggttcagcatgtgttttctgttgttagacttgccgagttcaaattccttctctgctgcttactagatgatagcattggaaaagtgacctctcctattgagcctcagcttaggaaaataagatttgctaatagcgccaatacctcacagggctgtcaagaggatttatggacacacagtcctggtacagagtaaataatcagtagatggtgatcgttaatcattactcaggtttcaaggtgcttgcttgcttcctggaagtgtctttctaattcaacttagcttccaaggctggaagaaatgatactcacaaaagactaggcagagtagccaggcgcggcggctcatgcatgtaatcccaacactttgcgaggccgagccaggcagatcacttaagctgaggagtttgagaccagccagggcaacatggcgaaactctgtctctacaaaaaatacaaaaattagccaggcatggtggtgcatgcctatggtcccagctactcgggaggatgaggcgggaggattgcttgagcccgggaggcggaggttgcagtgaggcaaggtggcatcactgcactccagcctgggccacagagcaagactccacctagaaaaaataaatacataaaaataaaagagtaggcagagacctagtttatagacagagaataaaacaatatccaaacatgaggtctttcaacaaggtgctttattggagagtacagtgtgagatgaggcagatagaggtgatgcttttgagaggtgatattcaactctgacaatacttcttggtgtccaggttcttgtgtgccttgttatatggagcttttgaaaagcagatggcagcgttgcggtcgcagttgcaaatgaaggcctcacactctttgtttttgcctggagagggatgaaaggagaggactgagccaaggtggaccctgttttgtacaatctggggcaagaagaattaactggaataagctggcagccattccactgatgcacatttagggctgacagattaagtgaatacaagtacatcaggatgcccagttaaatttgactttcagataaacaatgaatgcaatatttgggacatataccccccaaaaaattatccattgcttatctgaaagtcatatttatctgggcatcctgtgtttttttgttttgttttgtttttaagacggagtttcccttttgtcgcctaggctggagtgcagtggcgtgatctcagctcactgcaacttctgcctcctgagttcaagtgatactcctgcctcagactcctgagtagctgggactacaggtgctcgccaccatgcccagctaatttttgtatttttattagagagggtgtttcatcatgttgtccaggctggtctcaaactccggacctcaagtgatccatttgcctcggcctcccaaagtgctgggatacaggcgtgagccaccatgcccaacctagtttctctactttaaagcatgtattttaaaaattatggaacatccttaaatggaatactacatagacatttagaaaaattaggtatgcctgcacatggaaattttcccaaataaaaaaagctagtgtatgccccaaaaatctggaggaatatgtaactggttatctttgggtagtaggattatagatgccttccactttccataatagatatttatgtagagtttgaagttgcattacttttggcttgtttacttttataaccaaaataaacaataagattacagttaaaatgcatttaaactttattacatataatttacgtatctctgcttaccttcaggaatcttattagttttgt

SEQ ID NO: 619 - DNA, 1216 bp, Homo sapiens
atgcccagagttgtgactcctgaggacctctgtccatggacagcccaggtcttcgtaaaaagaatgaagatgagctttgcgttgactttcaggtcagcaaaaggccgttggatcgcaaaccccagccagccgtgctcgaaagcctccattgggttatttgtgccagcaagtcctcctctggaccctgagaaggtcaaagagttacagcgcttcatcaccctttccaagagactccttgtgatgactggggcaggaatctccaccgaatcggggataccagactacaggtcagaaaaagtggggctttatgcccgcactgaccgcaggcccatccagcatggtgattttgtccggagtgccccaatccgccagcggtactgggcgagaaacttcgtaggctggcctcaattctcctcccaccagcctaaccctgcacactgggctttgagcacctgggagaaactcggaaagctgtactggttggtgacccaaaatgtggatgctttgcacaccaaggcggggagtcggcgcctgacagagctccacggatgcatggacagggtcctgtgcttggattgtggggaacagactccccggggggtgctgcaagagcgtttccaagtcctgaaccccacctggagtgctgaggcccatggcctggctcctgatggtgacgtctttctctcagaggagcaagtccggagctttcaggtcccaacctgcgttcaatgtggaggccatctgaaaccagatgtcgttttcttcggggacacagtgaaccctgacaaggttgattttgtgcacaagcgtgtaaaagaagccgactccctcttggtggtgggatcatccttgcaggtatactctggttacaggtttatcctcactgcctgggagaagaagctcccgattgcaatactgaacattgggcccacacggtcggatgacttggcgtgtctgaaactgaattctcgttgtggagagttgctgcctttgatagacccatgctgaccacagcctgatattccagaacctggaacagggactttcacttgaatcttgctgctaaatgtaaatgccttctcaaatgacagattccagttcccattcaacagagtagggtgcactgacaaagtatagaaggttctaggtatcttaatgtgtggatattcttaattaaaactcattttttttaaataaaaaattgttcagctttata

SEQ ID NO: 620 - protein, 308 aa, Homo sapiens
MSFALTFRSAKGRWIANPSQPCSKASIGLFVPDPLDPEKVKELQRFITLSKRLLVMTGAGISTESGIPDYRSEKVGARTDRRPIQHGDFVRSAPIRQRYWARNFVGWPQFSSHQPNPAHWALSTWEKLGKLYWLVTQNVDALHTKAGSRRLTELHGCMDRVLCLDCGEQTPRGVLQERFQVLNPTWSAEAHGLAPDGDVFLSEEQVRSFQVPTCVQCGGHLKPDVVFFGDTVNPDKVDFVHKRVKEADSLLVVGSSLQVYSGYRFILTAWEKKLPIAILNIGPTRSDDLACLKLNSRCGELLPLIDPC

SEQ ID NO: 621 - DNA, 50720 bp, Mus musculus
acctagcaacagggaagttcgcgctgatatggaaatggctgtcctgactgaagtccatccaaaccacctgacagcaggaggggtcgcagggactctaaacagtgccatattatcttgaagccttttcttgtatagctacaaaacaagtttatttttttttctccccaagttttactatattcgatcctacagggaagttgaaagaagacatagccaccctgacataggtccagcgctcacctgaatgtcatagctgctgtaccatatgtacttaggtgtatgtgtacactatctgaagatagctttcctgtaagcaccctttggatatcctaagcctagtccactattacaaaagcataaccaccattagcacatctacaaaaattaaaatgtattctgtgttatattctgtaagggggcatattcatgttttcctaatgtattttgctttgcctttttttttttttttttttttttttttttttaagacagggtttctgcagattcacagagattcgcctgcctctgcctctgcttcctaaatgctgggattaaaggtgtgtgtgctaccacctccctgcttcctaatatattatgcaaaccaggtataagcaaagtccctgcagtggtttttcctttaatctctgacctttcctatagaatggaatcagagcgattcattgttatacatacagctgaacttattctactctggaaagagttttttaaagtagtgaatagacttactgcttttggcacactattctaaagttgcaatttctgaacttttctgtatcactttgcccttttcttttcagaaaaaccttaacttattctgtttggttttgtttcattttgtttcttagatgtaagcactgtctagtagctcagaagattccagtgagaaaaatcctagggttatgtgctctgcattcacagcatacggtagacgctcccacctctcgtttaccagacgaacttgttgtaagagatgtcatcttaaatccaatcagcatgaaaccaagcaacattttatggattaatcacaacaaatcacacttagaaagtaaaataatttcccaaaagttctttcttgattaccagctaggccctcctaatacctgcaggtgaacggggcttgtcagagctgcctatgtgactggaaattagcatatgcaagtgggctaagtctgctgtctactctgcattctactgtgcagtgagcagattgcgtgcagacgcaaacacgcaaacaccgactacagtaagtgtctgggtttccattactgctcgttcaatagtcttgtccttcaggccaagccttggtctagggatcctcttacctccatctgcagagtgctggagtacaggcctgcactcagcctctggaggcaatgccagggggatcagcaatgcttatttttggtcacaagaacattttgcactgttagttgtccttaggctacaaaaatggagggtaaatgaatgttccaagtttgctctcacattatatggggattctttttttttctgtattacaaaacctaaaattatttaatgttctatatcaaagtgagttatgttcttacctattttatttcactaacttggacttctttaatggtctgacatttgaattttaatcaaaccacagaccctttcaatgcctttcggcctaaggacaatttaagtaaggtgaaggacctccattagccagctacattcatacacctcattccggtcactactgaaaaaaaccatagagaatccaacaaaacaaaagacccttacctgaataaatcagagcccgggactcaaactttatggggaacctcttagggagaccataattattaatttgtactaaaaatattgtagctatcttcacctgaacttccacacttgtctagaagaccatgcaaactgagtaggatattggtggaatgtatgttacagatttagacactcagctagaccggaagctatcctgtagacaaacactgtcaacttacttctcaactacattaccatatgtaatatatacaaaatataattattgcaggaaactgccatcaatattttaataagcttataatgagatattgaattacttgttctttcaagtataaaacatgcaatataattgtggctgccagcccacactgaatcctgcctcctggtattcatacctttaagaggtccctcccacactctaacaagggagagtggtttaatctacagaatacagcaagggatgatgtactgcttctgaggcaaggtttcaaaaggagctatgctttctgcccatctctcagatcatttgctctctagagagaattcaggtgccatggtggaaggacacaaaagtagcctttctgaagatccacagaagactgaactagagctgtccacttccagatgcctctatcagaagccacgtaaccagtgtatttgttttaggctacttggaagtcatctgctagccgcagaagatacctccagaatacgcttcacttacctcaagttgtatactttttttgttttgttttttgtttgtttgtttgttttgttttgttttggggggggtgtttcaagacggtataaggttttgaaacacagtaagatattttttattttatggctatgagtgtttgagtgttttgtctgcatgtatgtttgtgcatcatttgcatgctgtgtctatagaggcctagaaaagggcatcagttctgttggaagtggagttacagatggctgtgaggagctaagtggcccttctgcaagactggccagtgctcttaactactgagccatttctccagccccaactatctaactcttaatttttaaaatgatagccaggcgtggtggcacacgcctttaatcccagcacttgggaggcagaggcaggcggatttctgagttcgagatcagcctggtctacagagtgagttccaggacagagaaaccctgtcttgaaaaaccaaaaaaaaaaaaaaaaaaaaaaagataatattcggatgtaatgcctttaataagacccattaccaggaacagtgaggagagaggactgatttctcatgctataaagcctaggataactatgactgaccacaaatgaatacttcctaacagctaacagacaggatgaaccatggctgagctaacagtcatgaggtatcttaatctgatctatacctgcattagactgagctgctgtactgtgtatatgcagagtgcagaaaaagcctttaatactgcacatgttaatatccatgccgacatgaacttttctcatctgaactttcctagagaagggtgaactgtcttagccaagcttggtagagggaactcagtggctcagctctttactctgttttctcggctctggaagactgaagggagtcatttggtgagggccgctctctagcatcctgtaactgtatgggataagctatgttcttggagtcctcttgagaatgactgaaatcggcctgtttctgaagtgtggtgtcaatcaactcattgctgttgccaacctcagccacattttctaaaaaaaactttttcgggagggtgtgtgtgtcaacttacatttatcttaactaatgtaattggatccaaatgtatgcagaggaagaaaaagagaagtagtcttaagcggcttctaaacaagtatttgttgaggactgctctctggcctcctgcacctgtaggggatagccatgttcttggcccatggaatttatagcatctctgaagggctatacaatgagactcacacagcaaacagtaagaacacgtttattaatggataggtggaaaaccaggacctttggcaagcattaggaaactcgaagagaaaaaaattacagatgctcagaactcatccaaaccctggggtcaggagaggacacagttatggctttaacaagtccccaaatataaagctgacccacaataatttgaggacccatttgtcatacatgggcaagtgaaccgtggccgagagactgcagacctagccgaggaaagttcaatgatagaactaacaacccttaaaggacctgtagagtgtggaggatgaggaaagactgccatgtatcctgagagcttcctaactgccatctgcttctttacgtgttatcttatttaagataagtttattttttatatgggaaacctgggctcagaggtgtgaaataattttcctgagattacaatactagctagatgacagaagtgggactggtagatatcttcattttctagatgaaattgagccttggagaagtttagtacttggtctggagtaagtgccaggtgaaggcaggctgtgtctcccagccgatgcatccccgcctctctcgtagtctaagagaggagtctgcactacttagagcacgcggtggcacagcacgagtaaagaagctggagtacgccactgaaaagcaggccagatttaaaacctaagggtttttaaagccatctttccagctccacagtccaatgctgactcgtgaaacagttctgggaatcacacagtaaagatgctaataacttaaagtcaataatttaaaattactttatatatataaaagacaatttcttcccattctagttttgttttaaatcattcattaaacaattactagcgcccagattataggaagttagagtctagtcataagactaaactatgatcttgctatttgtttattaccaacctagctaaaatagtcaaattgattttatggtaagtttcaattttactttgtttattttttttttcatattttttcttggcaatttcctgatttaaatttcctggctaaaccaaatgatggcatgaactcttggagagtaagacaatctatttctaaaaagccctaaattcagtccagtatttctgactgataaattcatcttgaagtgacaactatgtcccaattaagaaagtgtttctctatatgagtttaattttttttttttttaatgtagagaactcctgattgctaatcagcatgctgcatgattacgttcaggccttactcaaagtcctatagtatgctgttttctcactgaagtatgcagggctcatttctgaaggccaggctggttcagtctaagctcttagcactctgacaatgggagggagctacacactcagctcagctttgggggtgggtagtaggctgaaaaaaaataaaaagctccggattggaagttagaggatgcagccttcagcctcaggtctgacagtttaatgtacaaacttagatacactgtttccttctggcttagttttctgtctcagagcgggaatgctcaggagaggtggctttggcagaggataacaggtcagttcctaacacccacatgagctgctttacaacttccggtaactccctggtattccagccccagggaatccaaaacctctccagtcctcaggcatctgcaccaacacacacataattaaaataaaaaataaatctttaataaagtagcagcacgaagaagttgccttctaaatccaactacacatgtagagcaagaccattaaaagaaaaattcagtttaaatagcatttgctgagcatgctctcgaaagccacggtctgctgctaactcatctccaccctgcacgctcaccgtcacacgctcaccgccacacgctcaccgccacacgctcaccgccacacgctcaccgtcacacgctcaccgccactcttgctgtgctgcacgactgcgatgttcaaagatatgtaagttgtctgggtagaggtccctcaacacagctctttgttcctctggtttcaaatgatgatgccactcaggtgatgtgattaatcaattttgtttagagtcaggtatgatattaacaccactctcccactctcatgacgcaggcacagggcatgtatgagccatggcagacagaagtagctatgctactgtttaggacacacagagattcacatgtgtgagaaatgatgagtatatcatttattgtacaatgctttacatttttattccactttaatctatctacttagctctttgcttcttgacggtgcaggactgtgaccagcgacttcaagcccctgctgcagtgacgtccccaggagatgtactaaccttaaactgtgagtcacaataaacccattcttccctgcattgccattatcagggcatttttgttacagcaacaagacaagtaaccaagacagattctgaaagaaacctaagcaacccaaataaatccgaagcggactgacaccgtgacagaaagccacctctgagacaagtgaacatgtaaggcaaacaggggcatactatgcaacactctcattaaaaggcaggacacaagccacatcctaatagcactttacttgcctctatatgcatgcaccgccccctcagcttctattgatcctaggcagggtgactgagagacaggtatagcatgaagactcattgtgccaagtctgagctatgtactactcaatttaagcagtgacttttgaccagcaagaaggcagtgtaggttgagatggacaatgtccttagtggtagtctcaagaaagtatctgcaggtgacatcacaactataagggactttcctcgagctatttatctgctccaaacttgtcactgtatagatgttctcagggcaccaaatttaaacaacctgtataaagtacacagccagagacagaattagataccagatactccagtatctactctgtgactcatattttatctgctcgtttggggaaaagaaccaggtaagtgtggatgcattatgagatatcatgtaagtttacttaaaagttctaagagaacaaaacaataccttgggacaacgactacaacctttggcctaatggataagctctgcacatcccaataattgtacacgagtagaatgttccccatagttaactcacttgaactcattgacaacaaataatgcctcgaattaatttttttaaacaaatgccttgtacgagagaacttgccaaatataaatataggccgataattcttttactaacacctaagagttggagacttaaaaggttattatagtggggcctggtagaacagtaactaaaatctcactcgagagactgaggcatgaatacaccaattctaggttgacttggcctacacagtgagttcaaggccagccaaggaaactttgtaaaacagtttctcaaattaaaaaaaaaaaaaaaaaaaaaaaaaaagatctggggaaatggtacagtacttgcccagcacgggtgtgatgtccggattcatttcccagtactggcaaaacaaagaggagggaagttataaactcaaccattatagaaaaccccttatgccagcggccaacagcagcacacagcaatcaaacctattaatgttgtttcaatgaaatacacaggagaaagctcacgtatctcattggtttgcaccagtttttactaccaaagagcttttggtttttccagctttctgaagataagatttagtaaagggattatagactgtactctggaaagtcaggctgcccgggtacatggtgcacaggtgaaggacagaggtggatgctaacggtcttcctttctctcggcttactttttgagacagggtctctaactgaatctggggctcacagattcagccaggctgagtggctagtgagcccctgggatccacagatctgcacctcccccagcctgggataacagatgcatacagttgggccaagctttatcaaagtgctggggcttccagttcaggccctcattactgcagggagaataacttactgatggaagtcgtttctgcagtccagtaaattgtcaatgagaccagaatacacaaccaccgcagggtttgattttaggacaagtctcaactctaagcactcatttgttatatagcccaagctggcttccacccaaggtcctcctgagtgctgggcttacagaggtgtccaccatacctggcttagaggtagcatttatatcccaggttggtgctaaaggtttgttttcagttaaggaatacaacagaaaaaaagaacaagagctcacaaaatgatctgcagagcactgtattcctattgcagcttaattaattattagttaaataaaagcttccatttattgaatatgaatttctaagtggaaatagataaacctactttagtttactgaggttaactatactctctatgggaccaatgtatataaaaacaggcactctgcatactgtggaaagaatacacagaagtacatggtatcttctcagctggggactattattaacctgaagtaaattgggaattttctccccccccctccccgacccgccatattccatcttcattttgtttgtcactattaagtttttctggccaaaaattttgttttaataaatttttcattaaagacagcaataatccatttttatttttattctagttgtttgtggatgttgctttacacctcaaaagtcgggttacattttaactgaaccaactagatcattcaatttatgagctgacattcagcaagtgtttattgggaggggaagtgtactccactctaaaaatggaaatagcatgttgaataagaaaacaatcctattaatcttggctactctctcaggaagaaatactttctcaaaaacctcataatccatacaaaaagaaatcttacttgtttgatcttacaacaaatataccagtacagtatgtagtgtaaatgcaaagataaataaaattaaaaaaaagcaaaacctaaccagtctattttcgtcatgagagaggagaaaaaaaaccctaacaaagtctctgttggaacgctcagcgatttccattcctaagtaccacaaactgaaattcttttattgaataatttcttcctacagcggacttgtttcccccattgcacgctaccaaaattatcagtattctgccagaacatggtcgtttaagaccactaatgaaaccctacaggaccgcaatccaaaatgccagtcatgattcctgtaaggtccagaaaaaatcccaaattgtagtcccaggccacggaaacagtctatgcaaaggactccaagaataggatgtcctcatggacgcgatcagtcatgacctccctgacaccacatgacctttctacgaaggcagttcttaaaacttagcaactgagctctcccctctctgaagttcaaggaggcagggcggctgctgagatgcgcgggtcggctgctcagtgccaccccgggtcaagtgctcgtctttcgctaccccccttaccgtgagcagatcagagagggaagaaagaaaaagtggcctccaaggatgggtttggggaagaagggaggggcagctccgtgtgtggtaaccgtttgtgaacacgtagggtggtggcgcgcgggccgaaaagaaccaactatgggagcccgtcgtggcgtccgccatgacggcccgccagggaggcccatcactgcgcctgcgcgccaggcaggcagccgcccagcgacctctccttcctctgccgcgtaatccctccgctgaaggccgcgcactaattttaatcacgccccgccccctagcctctggcgtcacctccgccactccagcgctttccagcagcttccagaaccaagcctgccccaccccctccagctccctccccctccccctcccccgtcctcccgactcacactttgcaggctctgtagcgaggggccccgccctgtcgccgcagttcccactgcgcctgcgcctgctgggcgggcaagccacgcctctgcggagccctgccggaagtgctctggtcttccccttccccggccctgcccgcgtgctctcaagcagggctgcctgccgcaggaaagtgtttgtggggtagctcttgggcggcggactcgcaggcggaagttgctttcctggcggagagggctgtgggggaggagccgtccgagggaacgtgggttgaacgttacggttagatggtggggacctcaagctggaagaggagttcgggtccactgtatgcgaagaaggagcgtacttcgggagggtaaggaagacagtagttccctcgggaagtagaaattgggacggctggagtgcccggggtgggtcgttggcgcgctgaaaagatggggtaggaacgaggttgtggtgggcaaggtggaggatggaggtgcaggctgggtcttcaggttccggttaggctcaaagaggtaaacgctgaagagaaaccagagtttgtgcccgccccacgaagagcgtggagatgggctgggtaacggaacgccgcgcctcttggacttccttggtaggcttttgaagctcagttcgcgtggacccatccgtctcaaattcgggaagctggactgggtaccaagcagtattgggctctgtaaagcctatcccttcgctggggcttaagtctgctggccttgaaaattcatatgcagagccgagagataaagctccgaagggttccaggccctttgaatacctgtaatagtttctacacatgcagtgaattaaatttaaatccctctcgtgattggctgctaaatggatctattctgggctgatatctcccattaaggtctccggaatgcgacttacctacgttgaaggtgggggctcggtggtgggcgtaggtaagaggaaaagtgccggagatgaacactggaaaaccttggttgttctccttgaaataagctcatgtcataatctttaggatgtactgagctgtttgggcggacttcctacaatcagattggattaaataggtggtttgaagcggagctgtcattttgacagtgatatgaatggaaagagagacaagttcgaaacatttccaaagcctcgttcacgagtttagatggcgcctactgtgcaaacatgggagatgagagtgagtagacggcacaaactttctagtctgtatttggaaacccaaaagatgccaaaatttagatactgtacagggaggagctagcagttacacttggagaaaagataatgaaggtaatttattcctagacaaattgaaatttgagacccaccccggggttttgtgtataatacagtgcttgaaaaaccccaagagtctacttctggtattttaaaacttgaatattctttggggagggggaatttcttaatattgtttagtgtttctactaccatcttaatgggtctcctccctccttctctccttccctccctctcctttccttccttccatagacagggtctcactatataaaccttcctggcttggaattcactgtgtgaaacaggctggcttgaaactcacagaaatctgcagtagttctattgagagagatctgtgcaatggaattaaaaggcttaaaggcgtgcatcaaccaccatgctcgaatatgccttgacttctttattgacaggaaagcagacttgaaggtttctcatttttacctccatattgagaaagaaccttattccacacagttacctagaccctcaggcagataaaaagttttctcaacaccctttttaggagtctgcaggtttctcttctgagaatgaatgcagaatgacagaagcaacacatctctttccctcagagcaaagtagaccagatggtaactgtaacttaggtgttagtatcttgtcagcgcaacttcattttgttcttagaacaaatccaggtgtgtagcctaggcttttaccacttaagcacattgactttcctgtgccctgtaattctctaggttataagtagaaccagctaacagttgtgattacttttccagcttctggaaattgagattcactaatactgacctctctttgtgtgtctgtctctctctctgactctctgtctctctcagcccaggtagactttgagttcctttgtagctgaggctggccttaacttgtacctgcgtcctcctcctgagtgggcacagatgtctttcaaactgtgtgtatatttttggaattactatgttttcttcacaggaaaggcttttcagacttttcagccaggacagaaaagcataactagttttttgttttgtttttcgaggcagatttctctgtagactaggtggcctcaaattcaccgagatgtctgcctttgctccctagtggctagggttaaagacatggaccacactcacccagtacataacaagtttttaaaagtggatctgtgagccagaaggtggttgttctagaattacagatccataggttttggaaagacttatgcttgaagtttcaactccttagctacatgataatttacctttgcttaaacgtcttttaggtctgcttttgttgtaatttaagtccatttttttcccttgtattgagctgtgtctcatgattttttgctctccgatcttggaaataggtctgctctgtggaaatacactcaaggcatgcatgtgaaatttatttgtcttacagaaatacttatactattgttctgatacagattatttataaagaacataatattttgtgggtagctttttaaattctgctggttatgagcctttaatcccagtgcttgggaggcacaggtaagcagagttcaaggtcctttctttctctggtagaacagtgggtctgaaggacttaggtgctttctcattgtaacaacgacacggttttttatagagactggaaagcttaggttcttcaacctagttgactagcttgctctgacaagtagctacctgtagggagagttctgtgtgttaggaagctgtatcctgtggtcactctcatacatttacacatatctacatacatggaggtgttctgaagactagagtctaggatatacttatccaagagcatgtagctcacaaacatacttaatatctcttgtcttataaaattgcaaactctctttttagagtaaataggatttttatttaattgcctgttgactttttttttccagggttcattgaaaaatccttagtgattttgacatgttccaagtgacataaattagccaatgactcggaatgacggatgattctctgaagattggaaatggtttgccactggttggaccagggactgatgtagggatatcttcactccccatgctggggtacttgggaaaagttagtgtacttatttttggcctcagtgcaaaactggttattttcctcttatgtttgaaatttaaatgaaatttaaaattttatactatgaataaaatcctaaaaaattctgtcttccacggaaatcttacagcaatggcgaaagatgattataatttgtttacctctctgttattgatatgtgaaattagaaactaatgcctagattttatggtttgttattctttgaaaatatggactatatacattttccttggcagttgatatttcctttttcttgtgaatgaagctaagtcaaattttaatgttgtttggataatagctgtttaagatagtaaatgtgtttagtcttggcagaaatcttctagaggaaaattatacatttttttttctggtcacccttccatttaactcttttataacttactatcataggaatgtcttttaatttgcttttttctcttttagaattatgcttcagctaaagtcacaacagacgggcattgccctgcttgtagagcgaaaggcaagctaagtgccttaaaaccttaccgcattagcttccaagaatctgtctttctgtgtgaggatcttcaggtaaagtaccactaatattatttagtatattgcttttatatatattattttgtgtacttctgctttttcttcattatttaaattttattggttttatatttttcagagtataaactttgaatgcatagacaatatttcgtaatttatatctttttttgttgttgtttttttcaagacagggtatagccctggctgtcctggaactcactctgtagaccaggctggccttgaactcaagagatctgcctgcctctgcctcccaagtgctgggattaaaagcgtgcaccaccatgcctagccataatttatatttttagtgcccacagtctgttaagtaaaagcagtaataagatctctcacaaacattcagtttacattggataagttgaaaaagttctttttaagaattttagcactaaaaataatcctgtttggttttgtttttattttgttttacaataagaagtttgtggtattaaaaagacatgcaaattaatttggcatttaaaaaatagccacttacatctccccaagaaaccaaagatagtactcccagatccatttttgttgttttccttctcctcacatatacaacttggcacatagtaagtaaggccaggtgaagtgaggaggctggaggcaaagaggggcatagtgtcttgtctgttatgatccctgtgcctccagattgacagactaggtgatgcgcagggctctggctgtcctggtcttcatttccttagacagttatcagctatggttcctcagcgatagtgctgtccagtcatttatcctctgacttcccagggggtgacttagggtggtgctcctaggaagcttcaggatgcccaagaaagaccaactggttaaacgcttggcactcaagttcatccactgacccacaggaaagggggagggctacagaccagccactgcaggaatgggagtattccatgaatttgtaggttggtgtgaccagatggaacagaggtgccacaccactcccttcctgccccacatcgtgccctgtgtattgctttaccagtgttgttcttatggtccctagagtataccattgagcacatttttctgacttctctgaggtaatcttgacactcaggttataggaagcagtttgtccccagtccatcaggtacaagtgcctggagttgctaggtggcttttctagagggacatttgcttacttggtgtccatttcagaaacgtgtgttaacagggtatttgaacctctgtctagttagggagtggctcatttcttagtatgcacctttaatccctctggctggaatacagatgcacccttagtactcacctttaattccagacagtgaaggtagagttagtttgcagaaggacgcacccatgttttgaaagtgatgtctaattgaatggcacacggaaaaagtgacaaatcagagaaagataggacaaaataggatatggcccactctcacaaggaaagggaagctacgtaaggaagaggcagacagcccaagaagggagtccagttggtggagagcagtgcagtagagtgagagggcgagcagagcagcccagagagggaggaggaggcagtgttaccaggagagtttcacagagacagactgaagagagaacaagctagtaacagtaaagatagcgtgagcaagagaaggagaaggaatcagaagattacaaaaggttgctataattagtttgaggccaagcatagcaattcagtaaaaaattgagagaagccagattcaatcagtctgcttgaagaggagtttaagccagttgaatcagccagagttcagaaagacatgaggtttctgaaaggctgagcttattcagcagtaagtctctgaagctgataatgttctaggactagataagattgtatggaagctagaagtttccaggactaggccttgcttagctgataagaggcagaaagcctcagagatgacaattactacaggagaataaaagttacttttacacttgtggtgtccagttaaattatatgacgggtagttggtgtctacaggactgagtgcttgtgtagagaaaaacccctgagcatctgcctacaagcgttgcaagttcctgagagcaatgcaaaaagcaaataagctggttttccccctgcctagtggaaaagcagctgcagtattctagagagatgggatagaattaaagtgacagcctatggatggatcccatttacacagtccctttgcagacaagacacttgagtccctgctagaaaacagtgtttttacattatggcccatctgtatcctccagcattacttcaaaacatttctagattattcataacacctactgcaatgtaaatggaatgtcgtgctatattatttagagatttgacaaggaagtctgtacatgctcagtacagacacagcatcataggcccaagtacgtagctgtggaaatcgagggccaacagttctttgaaggtaaaatgacaggatttgctgaaggtccgggaaacagcatgggagtgggagtgagggtggttcccacatgttcctcctcatcagttggatgttgggaaaaacaaaatttggtggcagactaagtcagataaacccgagacaggcagagtaatcggttggagctttacatacaactaactggtggagactttgagcttggagaaagatttggtagtcatgagtacaacaagtggctaactgaaccatacgtgtgagtggtgagttaaagtatgactgcggttgaaccgtgagccaatactaagcggttagagacatcaaggagactcccgagaatcagtgagtttggtaggaataaaaccaagaaagagacggtagtatccagaaagtcaatgaggagagctctgggaaagtgaggaccctctccctagctaggggaaagggctaggattgatgcgattggatttgagaactgtggcacaagaaggaagaagttgggtttttttatatatgctgatcctaccagttagggaggggaaagtggctaaggctccccctggaacaaagggtaggctctaatgcccaagagaaggattgggttgatccaggactgtggttctcagccttcctaatgctgcaactcttaaatacagttcctaatgttgtggtgacccccaaccataaagtttattttcattgctatttcataactaatttttgctatggttatgaatcataataaaatttgttttctgatgatcttaggggacccctgtgaaagtgttgtttgacaacctgaaaggggtcatggcccacaggttgagaatcacatctggatatttggacaacacattgagagcaacagatgtatttggagcatccgttaacctaatagtgtgggtatggaagctttctagacaaagcatctacccacctttgaacaatacattcatatttagctggattttttttagccaggatctttaaatccagccctcaggagggagtctttggctgttagacatggatttaacactttcagtgttctctgcatcagggtttctctttgtagccctggctgtcctggaactcactttgtagaccagactggccacaaactcagaaatgcctctacctcccaagtgctgggattaaaggagtgtgccaccaccgcctggctctgcatccctttttaaatgataaggagtactctggaactcaactctatatgcagtagtttgcttgcttatattttgagataggttgtttttaattttcgagacaggccatatatagttcaaactgatctgaagttacaatcctacttcagtctctgaatgctggattgtaggcacagcccactactcctggctcacctctgattgttctgtgttatcattcctaggttcagccagagtcaggaactctcagggcgttagggttagggcaggttattactgacctcactgtacagccagcagtgcagagctcctctgtgtgctgaagaattgacgtgctcaggcggagttcagtgtgtgaatgggaagggaattcagtgcatgccacatgcccgtagctgtgaggtaaatcacctgagaacctgctagcttcctaggtgtaatagcttgatttagtactgtggttcttcgggttgacctggcaagccttctgctgtgtaaagaagtgtttgctggacagctaagcactaaccattagtgctcactgctgatcaggagctcggtgcagtcagtcagttagttggaaatcttagttcttcatgaggctgatttgactctattatgacaaattactggaagatatggctctttagttatctggagaacacaagtctaccatactggtgttgaaaggcatgttttaaatgagacatttaatatgcaagtccttgaactttttttagatgtaggatatagggactagagcaatgactcagaggttaggagcaagtactgttcttgcagaggacttgagttcaatcctagcacccacattaagtagttcacagttgtctgcctgtgactttcacctcctagggatctgacaccctcttctagtatctgggtatctatgtacaccacattcactcaaagatacatacatataagtaaggataataaaaatagaacttagaacatataggatacatagaaaggacctggtaaaatttttatttaaaaatactttaccagcttttaaaccttaccagtttttaatgttatgttgtatctctctctcaaataacacttgcagtctttcttcatatagttgaaagtttctgtttgcttgtttgttaattgcttttgtttttgtttattttgtttttcaagacagggtttctctgtgtcgcactggctgtcctggaacttactctgtagaccaggttggccttgaactgagaaatccgcctgcctctacctcccaagtgctgggattaaaggtgtgtgccaccatgcctggcaatttagtctactctttacttaaagccccttccccacttttttttagatgggactttttttgtgtagctatggctgtcctggaacttgctgtctagaccaggctggccttatgctcaaagagacccatacgactgaacttgtaaagtgtgggcattaaaggcctgtgctactatgttggacttacatgatttgatgatataacttaactagagaaactatactttggagatgggcacacttgagttagttacctctattttcagtttaggtttatagaggtactcttatgtcaaatgaatgctaaaatttttcatgacacaggaatctaaagttaaacttgaactgatttgttggttttttgttttattgtttatttttttgtaacaattttattttttctttctagtgcatttatcctttgggctctgagtcacttactaatttaatttctcctgattcagaagattgtcccactccaagtaagcctcaaaaacgaaaaagattggaaaccaactgtaggaattcacctcttccagtacattctaaaaagactagaagtcacattgtcactgatagtgaaccaattgtgaatggtaaatataatggagaagtgtgtgatgacttctcagcaagcttcccagataccagtgctcaccaggatcctgccagcacagctgcttctgtggagcagagtgaggctttggaggctgatgatgtggttgtggccgctacagaagatcctgctacagttagtgtcacatctgagctggaaatgccagctaagagcagatgtttaccactttgccagactctgtgtgtccagtggaaaaacacccaggccctgtgctggttagactgtatcctgtcagccctggtgcacttggaggtgttgaggaagactgtgctggaggcgtgctccagggaggagtgtgtatttggaaggctgtttgaaatgtaccaccaagcagatgagctgctgcacacccatcacctgcatggcgtcacaggtctgtgctacgtactcttcctatgtgttgtctctcggaatatggaaaaaaagccatgggtagtcattgttttgtgtggagacctaggcagggaacctagagatagtgccagttacagctcatgactgtccccaaagctgccagtaaagaacacaggggcagtggtattttttagcttgtcagggtgatcatagtcctcaccctgtgatagtcatcacctatagatagtctgtaacccgtcgaagttagatctgaagtctctaaaagtgaaacaacgagaagaaagtcgtggtaataaatacttaatcccactcaggtttctaccccacccaagttcagttcccagatagaagacacacaattttaatttataataagcctttaaagcattagagctgggcaggcattgaccctctatgctattagaatctattttcccttcaataaccctgggttataactcaccatgttctatctgggctgctcctaactcccagttgaccagtccttatggccatgttttcatgactcacaccgtggtgtcttctttctcccccttctttcttctctccctcctggtcctccctagacacaagcctgtgaaccgaaagccccacccacctctcttctgcccagctataggctgatggcatcaactgttgattgttgagccagtagttttaacttaaggagtgaggtcacatagcatcacttggtgtatgtgaggattctcttgtccctgaggcaaccggggctaggatttagcagcagacaataaatagaacagaccaaacctcaacagaagtagtaattcccaacaccctgctcttgatgactagggatatgcaaatgacttgggcagccttggatttttgtatctttgtatttatatgtgtacatacacatatttatacaaatggtctgtttgttttgctttgattttgagacagtgtatttctgtgttgctcaagccagcctagaaattgcattcctcttgccttagcctctggcatgtaccattgcatcctattttaattcctccaaattgcagggcagtggtggcgcacacctttagtcccagcacttaggaggcagaggcaggtggatttctgagtttgaggccagcctggtctatagaatgagttccaggacagcctgggctacacagagaaaccctgtcttggaaaagaaaagaaaaaattcctccaaagttggatacccaggaatcttaacttccaaccagaaaagaattaaaatattctcaggccaataagatggtttaatggtaaaagtgcttgccaccaaacttgatgatctggtatcagttccccagaacccatacagtagaagcagaagaatgtctcttcactgcatatatacccatcacatgtgtgcagataaccggagaccagagagggagggtgttagaaccctgggaattacggaaatgacatccaggatggagtccacttccagcccacccccaagcacatgcgaattgacgaatgaattagtagtagaagcacatcagtacagtcttctcttggtgtctatgtaagcttagctctaggacgccctacagacagcagggtcctctgagaggagcagcataatgcttgtataataccagtgcacattgtctcatatacttcatattttaatgaagtttgatttaatgaaggttgatcttcctaggcctgttgtacatgttaaagtcacatgcaactttttttctactctgtgagactgagatcagtcccagggctttgcatatgctaagcccatcacttggattttaagtcaactctagaatacttattcctaatgcaatgtaaatgttatgcaaatactgatgatactatgtagcaatactgataggagatttgcttgtttagtccaggtgctcttttccctcttgtattttccttttgtgggtggttggggatgggatgttggaacctgctggtttggaggccagttgtgtggttactcacctgtcagtactattccagcagtgtagaagataccttccaatccatgtagtctctgggatgtttcacactcaaagtcttgctgtacataaaggtcttcagacgtgcgtggcatctctcggaattggaagagacagatctgttgtctctgtgcataattttttcattccctttgctttctgtgaaatacctgtttgttctattgactatcatgttcttatatctgaaacatactcttggttcttctctatttgcagttggtatttttactttaagactgttttattacatttatttatttaatttgttagttattgtgtgtgtaggtcaaaggtcaacttggagccgagtgttctcttgcaggcttctgttctctccaccatgtgggatctagggtcaaactcaggtcataggtttgattgccaactgcctttaccctccaagccattgtgctgatcctttcttacttaaaggatgtcttgatttacaagaaattatttatctttcctttagaatccagtgatatttgtggctttttaagaacacttttccttttcttcatttagacagcccttcactatgttctttgagaagtcatagtttactttctagcattgaaatcctttttatacattttaaaatgacatttgtgtgtgtgcatgcttgcgtgcatgtggaggctggagagcaccttaaaggagtcatctaggagctaagctcagggctcagcctgtaagcctcagcctgcttactgagcctggtactgaaattgataattgtgtgtggcatgaggtcaatcacgtctatgttctctttgttttcagacagttttgccactttgtgaccagcattgtgtgtccatgctccttttcatttttgtgtggtcacttggtccctccctgcacccacagttagattatggctcgtgaagtcttacatctgtcaagccctctcaaccttttttgaattttttccaaagtctctactgtgtgtttttacctgatttcgcttggacttaggtttgtttggttttgttgtgacttctcattgttaacgaactaaacagtgtaatgggggaccgggaggccatttgtgtagctaccctgcattgctcccctgttgtgtttgccattgtggtttcatatcatgaccatagtcatgtaggttttgaaaaccttgcagattagtatcctaggagggtattgagtgtgcatattaaggttttttgctgagtggcttttttcaaaagaattattaaaatagcttttagggctggagagctgcactgcagcatggaggactggctgctcctgcagggttcagtttccaacacgcacatggtggctgtcctccgcctgtctgtcattcctgtaattcccagggttctaacaccctccctctctggtctccggttacctgcacacatgtgatgggtatatatccagtgaagaacacatggataactctttaagaattaagaaaaacatatgctgctctttttattacatgaaagagtctgtctcagattctttacccacctttgggtgtgaatatttatgcttttgttagatcgtttgtttcagtttgagtttgaaacttttttcattcatcagtcttccttacaatattaagacccttgagcagacagagtgacagctcattgatctgagaagagcaaaatttgatgttggaattctaatttttttacttttagtttatattagctgtctatagactactcagaccttttctaatcttgttaactgtgtgtgggcttcattattctgatggtatattttccttctttcttttcctttttcccccccatactttccaggaataaataacacaagtcttggctaatgttcatgtttaagtattttctttggttaaaacacttgaagcatagtgtgatgaagccataggattgtttccagagtcaaaccggaatgtcagaacactcattattctaatgtgtatctgtcactacatctgttgttggttttactcttaaactgagatttcatccaggtagtaaggacaattggtgctgtgcccaggacaggtgccaaaagagcgtataatgtatcacaggagaggcagaggaagaaatgagatttgcttttagtctctgcagtgtactgataaactttcgttcttagtccttactcggtattgatgagaaatgatggtgttctttttttctctttaaggtgaagattgtaaaaaattgacatcagaaatatttacagaaatagatacctgtttgaataaagttagagatgaaatttttgctaaacttcaaccgaagcttagatgcacattaggtaagtagttgtgaagcttggctgtaccacataaggaggtgcattgttttaatgattgggatctaatcttggggggtggaggggatgggcaggactctgggcagttttcttacaatctaccactggttaagtcactgttagccacacctggtctgtgtaagtgtgtgtgtgtgctggtgtttgagttctcaaagccaagtgaacatttgaactttgaaaccaaatctactgaacaacacaaggctaaattgtggtgctgttttggccagggctatgttaggacatcatatgcatgttagcagaattgttagggcccacgccactggtgctcagtaagccatttagacaggaaacattgagaagccaagaagagaggtttgttcattatggcccatgtccagaagaggaataagtaaggtggtccagtgacactaaggccaagtccccccctcagggtcctatcatgagttttagattttattagagggcaggaccacctcctcctgatccatccttgtttgggcttgagtttgcctgcagggtaggctagcaacttgtcatatgatgtgaaatccctgggacagcagcatctggctggctggcaccagagcttcagctttccattccctagcacaagattcctgagggattccaattccctggaaaccaaagtttcagtgttgtgattgtaggaagggagggtgcgtgtgcctcttttaggatatcttcattctgccatccaggatctcattgtcccttacagaagagcacaggggtggatttgctctctccactgagttgacatctggcttatgggagcagagtgaggcaagaaccaaagtctctgtccaggtctctccaaggcttatagtgttgtgacaaggaaaactggtatttggtaccttggtttggttttgttagggaggagaggtcctactgattgcccaggctttcctttgaactcaagaatcttttgcctgggcctttgaagtaactggatttacttacaagtgtgctgcatgtaaacctggaggacagaggttgacatcaataacttctccacattttaaaatatgtattagaagccaggtgtagtgtcacatgtctttaataccagcacttgggaggcagatgcaggtggatctgtgcaagctcaaggccagactgatctacagagtgagttcaggacagttatgacaatacagtgagaccttgcctcaaaataaataaataaataaataaataagtaaataagtaaataagtaaatatatatatatatatacacacatacacacatatacatatatatacacacatgtacataatgcatgctctgtatattatatataataaaaattatatatatgtgtgtgtgtatgtgtatatatatatatatgcatgctctgaagtttgtatgctgttcctgtgaattataaattgttcgccttcctagttactatttagttacagcagagttggaatttaaagtctggtgacttaatcacagatgtgtagtaaatgtccacaactcatttagatgccatttctggaggctgatttctatctttctttgtaagaaagatgttctgacttacatttgtatataaaaatagcagtggctggatgtgttggtgtacatctttaatcctagaatttggaaagcagaggcaggtggatctctgtgatttcaaggccagcctggtctctatagtgagttccaggacagccagggcttcttagtgagaccctgtctcttcacctccccaaatataaatatacatatgggaatatattgcaaagaactattaaaatagcctttgtaattgcaggtgttgggtaattgtactggctagttttgtgtcaacttgacacagctggagttatcacagagaaaggagcttcagttgaggaaatgcctccatgagatccaactgtaaggcattttcttaattagtgatcaagggggaaatttcggccccttgtgggtggtgccatctctgggttggtagtcttgggttctataagagagcaggctgagcaagccaggggaggcaagctagtaaggaacatccctccatggcctctccatcagctcctgcttcctgacctgcctgagttccagtcctgacttcctttggtgatgaacagcagtgtggaagtgtaagctgaataaaccctttcctccccaacttgcttcttggtcatgatgtttgtgcaggaatagagaccctgactaagaaagtaatgaaacctgctatctgtcctgttatcacaacagttgctggctatgttgtaggcagctgtagttccaggatagagaaggacagcaccctgagaagaaggtctcgggaggaggtgggacacactgtctcctgggccttgtaagctcccttgaggatgagaaggaaaggaaccaatggggtggggctctcaggaggtgctcgcctattaaactgccttcttgaaaggtatcagtcatggttccatctttgttttaaggacagcaaaatgtctcccatctctagttttaaagtggcagcagtttaatcatgcaaggactggactaacagttgagacgagtgcgggagttagaactgatcctttactcttgcatagcaaacctgctccaaacagaagtcgtgtctgaacgcttgtgaccaactctgatgtgactctaaacttttcctttccatggtttttgttgtagtttaacagtgttacagttctgaggactttctcctgaggacagtatgggtctcacatgtggcattcttgccattcttgccttatgttttcagaacatttcagaaataagagactagcatgggaactgagtttatgttggtgtgttgacacaaccttcctccaggcctaccctgactggctgactctgccagtctgtgttcacacatgtgtggagggagactggaccatatggatttcctttgttcttgcaggtcctgactgttaatcgttcttcttttcttttctcttttgcaggtgacatggaaagtcctgtgtttgcacttcctgtactgttaaagcttgaaccccatgttgaaagcctctttacatattctttttcttggaattttgaatgttcccattgtggacaccagtaccaaaacaggtcagtgttgattgctaatggattctttgtgctataatggttttcaacagtgtactttaataggttttgcacatacattacactgtgtctcaacacttccacagcagtttaccctccacccccttggatggagacaaggttgcaatagctcagggagaacttggctgtgtagcccgggttggcccagactataggttttctgcctcaggaagcatcatgtatcagcatttcttggaccccaacacacatttgatccttttctaagagggtctatctagctcagtagctggggctgacctcagagtgccactttcttgctcagccctctgagtcctgacaatggaggcatggatcactgcgatgtctgctgtgagaatgtctcactagtgaggttaaagggacagtttgtgacacaagaggctagagtcaacttgttggtctaaattaacttaaaaaaaaaatctatggcttgaagaatagctaaaaggagttgttaatttatttactgggaagttaggaacagatgagattagcacccttcactctctggaaggttcttagcagggcgtctgctctgaagtccttggcagtgttttgccctctgttagagacaaggcttttgtttgctttaggcctccatcatggatttgctcttagtgtatggtggcatttatagtgttcaggagagcggtcagagaggctgggtacttgtctgcctcgccggtcattgctcagtattagcaggaatcaggctgcccagtgcagctcacccaccagcaagcctcaacagtcagcaggtaaatgatgaggagcgagcgagcggtgcatagcgagtccgtgggatctggacagcaggcagagccgagcctgggagagagctgtagaggagactcacactaggacttgaaatacttgtctacgccaaggaggattctgctcccagatttccattgatttgtacaaggggtcaggttttctgttcatagtaacgagtcagtaggagatcaggagacctctagtgtcgtttcttgcctctgtgattccctgtgctaaactccctaatcactacgtgtgtttttaataatataaacagggctgatggttagaatcagcttaattacagcttttctagaattcacaggctagtggtttgacagcttttcattgagtgggttgtgtgtgccaggagtcacctagccactgagagtgatttctgttgtggcaattcagatgactggctgcttaggaaagtagttatgaactcactggcgaggccagtgactcagcactctgatctttcggcagctctgtgcataagaaggaaagtgggctctagcagtgttcgcacagagctcagaaagcacccaggggaaaccggcagccactttggtttgcatcttgtctttatttctttaaaacctgaaacttctttaaacattctttaatctttcattctaaaaaaaaaaaaagcaatttcagagtcaaagctaagacaggatggcctttaatcagtgtacgttggggttacaacaactggcttccttctcctctgacagaagctagtcaactagtcctttcattttagtgcctctgggttttgtgccagtataaggacttgtattaggttccgtagttatatttttggagagcataaaaaagcctggcctttggaggctggtggtcctgattcagacccagtttatctgccactcgttgttgtatgaaggccatggcacttgacacgggagagttgtttgtcgggggagtgtaatgtgatacttgctttaatgaaaatgtttttactagagttgatgcaactaagatttagtatacttggctgacggttgaagatggcttttaactgtcgccgttttccaagtgattgcccccacccccagccccccagcagatgaaaagtttaagtttgtatctgtttgaagacagtactctctttgttgtcagtgatgctaagccactttgcatcacaactcagcctgagtcagacagcctgagagtaacaatgttcacccagagcctctgatggctcctcactaggtagctgccagtacattgggtatggaagctggggactgattctacaatgtgctaagtggagaccaggggtggccctgaaataaccagtgtgctcagcagggcatcagcagtgattctctggagcattagtggagggaagctctgctggtcacccttctgtgcatgtcagttggtgtggaggctccagtgtctcttccgtggcaggggagggcatggctgtgctgatatgggcggggctgggaggcaagcaagagcatgcagttgcacgtgttaactaactccagcgaagctagctgagggattcaaactgtgcctgttttttaggtgtgtgaagagtctggtcacctttaccaatattgttcctgagtggcatccactcaatgctgcccattttggtccatgtaacagctgcaacagtaaatcacaaataagaaaaatggtgttggaaaggtgagtttccatttacttaaacatttttaggagacagtgaagatgcatgtacagttcctcgtgtcgtgggaagggaagtagtgagcaccacttacccttcagaagttggagtggacacttacttagggccaccagttgcttaccactgtaaaaactgagggtgggcaagcaggacacagtaggcttcaggagggtgcttagtttgtctcttgtagtgtttctctcatcctgttccctctcccattgggtgtacttttatgtgcatttgtgttttacctgcatgtatgtctgtgtgagggtgttagaagcctggaactggagttacagacaggtgtgagctgctgtgtgggtgctgggaaccgaacccaggtcctcagcaagaacactaagtgctccttactgctcagccatctctccagccccacctgtgtgtcttaatgtctgttttcttccggatgtcaatcagcttgctgatacttcatcgtcttacaagctccctgctgctggcttcattctaaacttcctgctgctggcctagggtaggctcagagttgccattccgctgactccttggcaagcgctgggtcagctgtctgtctgtctgctgggtcagctgtctgtctgtctgctgtaggactggtgctgctaagtgtgtgtacctggccctatctgctcaggtgcttgcatgtccttgcactctgaatgtaaatagaactcagagtagatctgcccttgtcgtttccctctggtcagatagtgtacgtagtaatagaaggttttgctttccatttgctctgtttgctgaacggtttaaaagcttaatactcccaacatgcaaatgctttaggtctgtgggtccgccccacactggcctctttgaactagtaactttgctgctgacctccgtccttccctccagtttcctttccatagctcttctctgggcctgctacctaggcatattctccagacacgatctcatcgcctggccctggcctcccccctacgttccgcagcatctgttgcatgtaaatactgaatcttggaggctgtggacagatgagctgtccacacagtatgcctgcctgctgtgtggtgctcagctcaccattcctccgttctgctgtgctgggtaaagcttctctcccgtctgtctttgtactctgctgctgttgggtttgctgtcctcctccctgtcagctattagcttgctttgtccctgcttcctggctctcagagtgtgagtgaggcgctgccttacccacaaatctagtcagcttggctgcctgggcccagggtttgagatcttcgtgtcagggcttctcttccttaataccgagacaggcaaaggcagctgcaaggctggctgttgtcctgcacacacctgtgcagaagcctgagcatcctggtgcttataaacagctttctgtcaaggtgcaggggttgacaatccgctagattttattatgttgtttgatctgctaattgacagcattgtaacataaatttttttttataaaagttataaaagttgttgcttttgcttacataaaaggttcatgttctgatcagaatgtgtttccattagatacaactgttttttaaatttaaaaggtcttttacatttcagtggatttgttattttaatgagccaattttataatttggacatttcctattttcatcaaaagtaaattgaatttatgtaaaattatacttaaaatttaaatggcaaggtatttgtataagactcttacagttttcactctgaaattaatacaacttgacttgttggtatttagtatagattttagggataatgtaagagaatttatcagttggatgtggtggaacatgcctctatcctagtacgtagcaagcagaggagagcagaacttgtgaattaagactggtttggtctacatagtgagttctcaagcagccagcatagatagatagatgaatgatagatctatcatgagacgctaaacaaataaattcatcatgaggctgtgagtaatttaaccatatatcattctaagatctcacaatgttacgagttcccccgggggccttgtctcagattacccgcatgtgtaatgcatgcccacagggaaaatctagtggtaagtcatgcctattgcatccaactctaccacttctctttaaggaattgttgaggaattctactctgagggtgttgatgtggacacttgacggtctagagtcagctttgagttattgaaaagagcctacagtgcttgccatagtctcaggaggtcatacatggtccgggctggcatttgaaaaggttattatatttaacttcagttttagcagcttcctgattgttcttgttgtgttgcaagatagtctcattatatagtctaggctagtcttggaacttagagtcccttggcctcaaactctaaggactgagataatgagtgagttccatggtgttaggcactgacagtgagtgctgctggtggtgctggtttgctttgttttgtttctggtggtttggtttgatttgagacagggtatgggatctctatgtagttctggctggcaaaacagggttttgttttgtagcttaggctggcctgaaattgtgtatgtagcttagactggcctcggtctcaagatccattcatcttggcctccagaattctgggactagaagcacagcctcatggccgaagattctatttctcaattaaagtctttatttcttggtagaaaatgctttaaagctccttgaattatctccaaagagcagttgtatccctttgtgacacagttgggctttctgaagatatgtttctttatgcgttcatgagactgtggcttccaatcatttggcttgcagctgatgtgatttaggctttttatttcttattatcagaaagattggaaatgacacatgaagactgttaacttacaaatgtttatagaccttttttcctgaaactgattattacagatgtacaaatttgtaattgttaaatgtatattgtctaagatttgagttattagagacgttttgatgaaaatcaagtttgtgatccagctcttagtgtaaggtgtggctgcccctggtgggtagttctgcgtctgtagctggctgtgggagtattctctgtgcgtttcctgagatgcttgcatccttccaagagaaaagcagctctctgtgaattagaagcaacaaggggtggaggatacacattatgctactgtttgtatttgtgtgtgtgtttaaaacaaactctgcctgttgaggtatgccagcagaggaggctgtcgtgaggttggatgtgtgaagcctggggagttagtttgtcttttagaacttccctagttatggggagtagaacaggtgaggggcaaagcccaggaccacagcctgttcagcacctgtgaggcccaggaataggaggacgttctgagcattcaccggcttggctgaagtgggctgaaccaaaccttgcaatgaacgtcgagattgtctggcatgtccctttccattaggccgtagagagctgaggtgtgtctgtcagcctctgcacaggggcttgcatagaatctgtggagtctggtctttcccctctttatgagatttcagaacagcttgggaggcatctgtttgcatcagctggactgtgagcatcgctgcagctcagactgcaggtggagttcatcttggcccattcctttgactcatttaccagggactgctctagaagccttaggatatataaaaagagtgaggtctgacaggctctgtctcatgtattatggaattcttgctcatatgtagttcctaaactttttatgtgcactcgcgtgaagggaagacacagatttctagtgtagactcatgagattttaggtaagtagatgtgtgaggcccaggaagctaaatacaagacgtctgtattcaaatatcttattagtaatggaaaggccatagcctaaggcctgcctgttgagctgtgagaacctatattttactgtggatcagctgaaagacagatatgtcatatcctcacagttggaagagtgtactttactggcatattttatgaacagtaacatcttggaattggtaaattaagtcagattttaaacccaggacaaagaatgaggtgataaaaacagtttacagaactttcaggacttaattgccgtttaataagaaatggacagggtgtaattgacagatcactcctgtcagaataatctcactcgaatctggacattgatttgagttcattttcaactgaataaattttgataagctaagtaagttttgacatctgtttaaatattaggagaaggaataaccaccatttcttaaaccccaagagctttgttattttaggcctatccgtaggtttgtttctactttgacatgttactgtaatagtgaagcgtatttttgaaattatgagcatctcattgtttataataaatccactagtgcactttatttttttaggatttatttatttattttatgtatatgagaacactgtagctgtacagatggttgtgagctttcatgtggttgctaggaattgaatttaggactctgctctctccagtcggctctggtcagccccactcgctcagtccctgttcgctccggcccaaatatttatttattattataaataagtacactgtagctgatttcacacacaacagaagagggcgtcagatttcattacagatggttgtgagtcatcatgtggttgctggaaatagaactcaggacctctggaagagcagtcagtactcttaaccgctgagccatctctccagtcccccatgcactttatttattaagttttttttttaagtacaaatttgaatttattgggtcccctaatttcttgagatgaacttagtgtctgaatatcttaggcataaggtttgctcttgcttttgccacttgacagagtgattgatgtggacacctgacagcagaggagctcctcaagggctgggcttctctcttcagagctctgcagcatagttctctggcagcaagttttgtttaagggtctttgtcagtcctgttgcacagtggctcccagctgctggccaccgcttcaaaggctttagtgtcacatgctctatagagccactttccctttctaatcacggcacacagctggggccaccgtgtccctcaacggagccgtggcatgaaattgatttgacttgtgcctcctttccacagagcgtcgcccatactcatgctgcacttcgtggagggcttaccaaggagggatttgcaacactatgccttccactttgaaggaagcctttatcaagtcacgtcggtaatacagtaccaagcaaataaccattttataacatggtttttagatgctgatggtaagtgtctaaacgttttcttttatgatactgcacatgagaaatagagccttgtggggtttgctttggtttaaagacagatttcatctggactttttccccctttcttctgtattcttacttttgactttaattcctgcgcccacccctgttcctctttcttaaccgtggtgttttgtgtgtccttcctgactgcgatgtgtgtctgaagggtgtgtgcacttactccttgtttgttgtctctctttcatttgttttgtagactctttttcactatgcatcccaaccgtttttttgttttgttttgttttgtttttctaacttaccatcaacagagctctggtacccatggcatctggatcatccactgaatttgtttatgttgcctatttttcttccttattatataccttctatgcaaggatggaggatttgttaattgagcaaacctacaatagtgtactgttacccaaaggccatacatgattcacatgagctatacaatgtgtgtccactggtgagtatgtgaaggggccaacatttatccaccattgtagcaccatacagagtagtttcactaccctaaaagcactactgtcctccacctccgcccttcccttcatatatgttcatgtatattcaccacctaaggagaagatgtcttgggagctgggaaaatggacaattgtttgccgtcccacaggagtacctaatttattccgaaagcccgcatacagaaagttggacgtggtgcacagttgtaatcccagagatccctgcagcttgctggccatccagcctatcactcttggcaaatgggagagcctttcttcaaagtaaaggtggacagtgttaaggaatgcaacctgagtctggcttctggtctgtactctcctaaacacaaaacaaagaaagaccatcttgattgattgtttccctgtaggcaaatatgaggaacaatgctcttgtttccacataaactttgtagtccgtttgttataaatactaaggactttggttgctaggtcaaggcagcgttttagttttgtgactggcagttgctactgtccccattagtgctcacattagtgctcacattagtgctcacattagtgctcacattagtgctcacattagtgctcacattagtgctcacattagtgctcacattagtgctcacattagtgctcacattagtgctcacattagtgctcacattagtgctcacatttgatggtggtagagactttggctgttccaatacatgtgtgtctctttgtacatgcgtgcatgtgtgcctgtactccattaattatgcataactggttttctttgtgacagttttgcctgtatacaatgtgctttgactgtgtttgtccctgcccacgaccccaacactcacctccctttctaccccttgctggtcatggtccacttcactggtagtattttaatcttgttttaatgttttgcctttaaggaattaaaaaaaaatctgttggaccttagacctctatttgtccttagtcactattgtgataccttagaaactgactagtagtacatagcatctaaagtggtctgaaacccagctacagaaaggaccttgtccattccgacctccctccccgagtctcagaattatctctaatgggacctttcagttttaaggggaaatggttttgtttttcatattttttattggttatttttatttacttacattttaaatgttatctaccttcccagtttcccctccacaaaccccctctcctctcccctcaccccacgcctctatgagggtgctcccccacccgcctacccactctcacctcagggccctagcattcccctacgcagggtcatcaagcctccacaggaccaagggcctcttctcccattgataccggacaaggccatcctcttctacatatctagctggagccatgggtccccccatgtctactctgtggtttgtggcttagttcctgggagctttgggggaggtctggttggttattgtccttctgtttctttcagttctttcagtcctagtcctaactcctccattggagtccccatgcttagttcgatgtatggttgtgtgcatccacatctgtattggccaggctctgacagagcctctctggggacagctataatatgggtgctgttttgaaggtgtctctaagaagactgtaatagtgtaagagagctgtaggttgtgattatctccactgcctgctgtaaccatggtatctaaaatggggacagagagtgtctgtgcagtgggcatgatcatacttggcaccatgcttcctcagttcagcacgtctgattccatagacagagctgtatgtttgccttgccacaattcccatgtgaattattgagaagcttttacttatccaggcttgtagttattagcttttctcaaattctcatgtggcataaataaaatgtaagtaaatgtaaaactccaccttcctgtaatcaatgctatctctcaggccatgtaacaaaatggacataggataatttctccatttcaacattttaagcttatagtttattgacattcactacatttacagccctataaatccatcaccaacatctgtatccagagctctctcatcatgcaaaacaaactgctcggtagacattaggccccctctctggctgttggagccaccgtcctaccttgtgtctctcagcccctcatgcaggtagaaccagggctttgcctttttgtgtccggcttatttcatttagcagattttcaaggtttatttatccatgttacagtgtgccgagcttccttcctttctgacactgagtaatgatcccctactgatctgttggactctgatgggtagactcttatagcctctgtcattgcttctcagagtggggtcatctgctcttggatgacagattatttctgagccattttatatttccaccagcaacacacaggaaaatccaatttgttttcatccccttccagtatcccctttcttctcttttccccacctctaccctctcccttttcctcctcctccttaaactatctttctaagatgtccccttttcttcttttaaggaatagtttaatctacttccttcctcctctcctctattcaatagtccacttcctatgacccttaggctacataccttgaaactattcaatcggaaaggactgccacatgaccacactactgatgaaggtgacgggtccctgaggctgctcccacaggtctgcagtgtctgatctgtagcctttacacatggaatctgcctcttctgaattgaagttaaacagattctgtcgtgattcggtgtgcatttaataaagaatgtaaactagccagcagatctgcctgcatcttagagcctggaactcttgtgatcagaaggaaaatcttagcatgtgactgaaaacagacttgccagtgcttcctttgtggtgctgagtgacacagcagctgggaaggaagaatggtgtcaggaaggtctaacatgtagctgtgtttcttgtttcccagggagttggctggagtgtgatgacctaaagggtccctgtgctaaaaggcacgtgacctgtgaagtgccagcttcagagacacatatcgttatttgggaaagaaaatcccaggtgccaattgaagaagctgcctgccttccatgcatgaagccaaatgtgcagcctgtatcaggtgaggagcagccgacttgtccagcactgtgttctctggctgggaccgccacctcagaaccctcagtcgcccatcccacatctatggcaggcgctcctcagactcttccagaaatccaagctgtagctcatggagatagtgtactttcaggagcaaaaggcatggtcgacagcattttaccctcagcacttgaagaaaccatccaggaaactgcctctgtttctcaggttgactccaaagattgcctgttggaagacaaacccgtggcaggaagtgcagcactggtcagagtacttgcttttcagccacaggactccccggggtcttcggggtcttccttagtgtccagcctgtgtgaaggaaagctagttgccccatgtgtggattcaagtttcccatcccaagctgtgagcacagacctgcaggcagtactgtcccaggcaggggacactgtggttcctaaccctgtgactgatgcccctgttcctgttcttgttcaggaattgaagtccctggcaactgagaaggactctcagacacagttgctgccactgaaaactgagaagttagatcctgagcaacctggtaaatctcaggcatctaatttgagaaaacgagaaaccacagcgtcttctaaaacagtagcagccaggtcagcacagaatcagcctcggaaagaagatcagaagagagccttcgtgggaagttgggtgaaggggctattgagcaggggtggtgcttttatgccaacctgtgttttgtctcagagtagagcagtaagtgacctgcaaccttctgttaaaggagccagtaattttgatggctttaaaacgaaaagtataagccgcaggtctaaaagaatgtccaggaaagctaagcacatggaggaactgtctccaaggaacagctctccaccattgagctggacagctgctctgacccaggctgctgagaacgccacctcagctctgttgagggagcaggaaggctcacgtccagctcccctcaggcacagatctcctggcaatgaaagcgccatctctccagcaagccgtggagatgcggctgaagatcaggttcataagcttcggctcaaacttcttaaaaaattaaaggcaaaaaagaagaaactagctgccctcatttcttccccgcaccgtgaaccatctctaagtgaccactcagagcctgcgtcccattgtggaacacctgcaagtgaccagtcagagcctgtatcccattgtggatctccaaatgactgtgagtccatagaagatctgttaaaagagctacagcatcaaattgaccttgcagacagcaaatctgggtgcacctctgctcctgatgccacctcaaataacagccagagtcatgaggagattttagcagagttgctgtcgcctacagccatgtcagagccctcagaaagtggggagcttgagttgaggtacttggaaatgggggacagcaccccagcacaagcacctagtgaattcagtgttgtctcccagaacacatgtctgaaacaggaccatgattactgcagccctgagaaaggccagcgggaagttgatctgcattcagtcatggacagtgcctgtataagaaccttgaacttggggagtcccatgaagactgatatctttgatgattttttttccacctcagcactgaattctttaacaaacgacacattagacatacctcattttgatgactctctgtttgagaattgctgagtgcgtgctagtgttttagttaaatactgaccactgctgctaggaggctgtgcctcttgggtagtattggctgaaatgcatagccttgtgttctagccatgggaagctgtgagctactggagtctgcctgtgagacatgagatctactgcaaattaaagacctccgcccagtttttgttggtttcattttgtgattgtggaagaatggaagggttctgctgtttgtgtgtagggtctggggaggtggttaaggtgctaaaggaggctcagcaagcatggccactagagttcagtcccagatccagtgtaagcaggcagatctggtggtgcacatctggagtgtcagggatgctaagggatgttcagcaagcatggccccttgagttcagtcccagatcctgtgtaagcaggcagacctggcagtgcacatctggagtgccaggagcttgctgaccagctaaaccaaccccagctgcagtgaggtgtagttgactgaggaggacactcaacactgccctggcctctaagccatgcacatgtctatgcatgtgtgtgtgtacgcacgcgcacgcgcgcgcacacacacacacacacacacaaagcaccttttagtatttaagacttggccttctgtgagtctgacagtgggtttacagataaacagcacatagctggtgaagtataacagctggattagaagtattgggttagttagcctcaggctccagatgaaggttcacaaaggcatctctagtgatagttaaacatgaatttaggggggctggcaggcagcggtatacttggttagcaaccttgtatgtaattatgttccctgtttacccataaattacagaattaattctagaaataatggcatgttctaaggaaaatgtttgttagggccagatacacctgtgggtaacattcatgtgtgtggatctccaaagttgacttttttgagtctttctccatcacactcccttttcttcattgaggcaagctctcacctccctcgctgctcactagctctgactgttctccctagccagcttgcacatcacctccccaggtgtgaaaaaactttcttgtttaccttttgaaatagggtagagggtctcatgtagcccaggctggccttaaactcactgtagcccaaactgacgcagaactactgatcccatgatggcttctacattctgagtccagggttacagataggagccaccatacctattacatcgcgcctgtaactaatcaaaataatcttgacagttctgctatggttaattgtactgccacagttattcttggcagattttgcacagatccaagtccaagttttatgtggggggagttgtatggagattggtgttttggggtcaaaagataatcgatttggatagcatgctcagcttcttttaattcttgccagcactaagtagtaagtgctatggtcgccatcaacgggaaccagcctgggctggttctgtttacattctgtgattgctgtcaaggtgggacatttgctctgtccaggggtcagtgctgtttctgtgctcagccttacctccttgcttcccatccacagcagttacgtgtaagtgccaagcactgcatgtgagcccgggatgaggcgggaaaatgaaagccccgagcttcaggaggaacttccacactaggtgaccatgggttggtggctgtaggagatgtgttcagttgattgctgataggtagttttgtcagtcaaaatctatcaactcattaggaaaataccttactactgcttttaggggaagcccagccttgtgctttttttgagccttattcatttttaatattaattcagtatttattaatattggactagtggccagcagtctgtaactcaggcctgaacaaaacttctgggacactttctttttcctttttttttttgtgtatggcatttcaaactgcctgtgctcagcatcactgtatagaactcagcactgctcagggccaacacaataaatactaccatgataaaaaacaaaaacttggttacagtgtggagctgaaatgggaagggtgtgtgtgtgtgtgtgtgtgtgtgtgtgtgtgtgtgtgtgtatttctgacctcagccaagaatgtgtgtctttagcagctcaagtttaccattacactgagcacatgaccatggaaagccttgcactgccggctccttgccggcagatcctggtaagaggagaaagggtccgatcctggtcccggtcctgccggggtctctcccaggctgattggcctaaaagaaatacactgagccaagagtcatgtcaaagcaggaactcaactttatggcatcagcctctcatataagtttggaacataaggggggtggggtgggaaaaggtgacagagggtatatagtgactgactgggccaatggcaaagctctacatcagcagtagtggggcagaggcagggccaaacgggccttgttggatcacctctgatatgaaagtgactaggacgggtctcaaaactcaagccaggctcaggtttgttctcaaggcccaaaatggggcccaacatctcccccttttgattttataatgagcaggttacatggctcctgttttaggttgcccaccacatggggatcttacccgtctctggataccatgtgtcactctggctcaaaaaggggggggggggtactccatgacctgtcttaggttgtcccagcacatctaagatcttacctgtcgctggtcaggtggagagctgaggagggggtgctcataggcagagggatatgtacagcctgtttcagaagagacaagtctttggtaatggatctcaacttggtgaagccagaacacctctagcctctgataaattgagtgagcttattgagcacatatggcccgacagtcaagataaggagaagaaggaaggggccaaggagggggaggaaatagggtaataagccatgaaatccagtccacaacgggttgtcttggaactctctttgcctcctttctaggtcttcctgaagcttctttaccttgttttggaggatcctggattgattagcatccacagtaaataatctgtagggtgcctcccaggctataagcatctcctttacagtcacagggattacccaactgtgttttgaggatctctcatgctccttgggggtcactgaatcctccctcagtcaagatggggagcagcatccatgtccgcagcagggccattttcttgatcatcttggcctcctgagggagaagcataggaggtttctcagggcaggtggactccgtggaaatgtcgttgtcagcctcctcttgttgaggcatatactttatatctctggctgctatccacattggtctttttcactttggggaaatatgcagccaaatcccctcctggctgtcaggaacaggtctggtcctctccaggctcctgtcagtgggtccccccatctgactcgtatcaagctgtaggagatggaggagatccaatgtcttttaaatggggacaactgagtattttcttttgaaaactttaaaatatttaaagcaaacaatcccgtttttagctgaccatgtggggataaagactcccccttttgtttttgtaactaaaatgtaaagcttgattttgtctttcaacaactgcctgtcctctcaggttgtaagggatgtctgtagtgtgagagatcttccacatctggagaaactctgaaaaaggtttgcttgtaaaacaagtgccattatctgttttaatttgatctggaaatctgagaatggcaagacattgaagcatatggctaatagcatgtttagattttattccagtgtggctgacacccaacacacatgggagaaggtatcaacagtcacagatatatatatatatatatattcccaaatggggaatagcaagtaacattgagttgccaaagattattagggagcccccgaggattactccaggtgagatggaggggaggtacctgtaggaatggctgacaagttcagctgctcaccaggtagtggcttcttgctggaagctgcagatgtggcaggacaatagaaatagacttcacgggctggtgagatggctcagtgggtaagagcacccgactgctcttccgaaggtccagagttcatatcccagcaaccacatggtggctcataaccatccgtaacaagatctgactccctcttctggtgtgtctgaagacagctacagtgtacttacatataataataaataaatctttaaaaaaaaaaagaaatagacttcacttgggtcagaagattccacccttggtgggctaggtggacgtggcaaaacaaggtctgaactagcccgctcaaggctgggagaagggcacacattgtaagcctgaagcaagttgatctgccagatgtttccagcagataggaacccttgaaggtcttgataacctcgaaagtgttggagataagtaggttgttgtctttgttttagtagggtaagtgcctgaatcatcagggggtgatggggttagaatcaagcccaatatgagcctctaccaaattagacagtaagtttactacatagagactgccagaaaacaaattaaagaattcagaaatcatattgatgagaaaggggggaagacaacaataggggaccccaggtgcccaccatcagtaaagacagtgggataatttgagttggggccagaaagaaagagtctgggggggcttccattcaagtctggtaaaggaactttggcaatcaactttgcctggaaagccctctagagccagagtgacacagctattgtttctctgttaccaaaggaaatctgtgtttttagatggggtaatgagggcagaagtctctgttccaaagagcctaatagaaagagctctctccttaacaatgcaatcggccagctggttagccatagcataaactcaaggggcccctcctaatgaaaggtggatccaatggaggggttcactctcttgaccaagtagtgtagtgcacaatgtttctccagggaaattatatacagttaggggtgggttgggatcatatcatttaagggtggccaaatcaatggtctgtagaatcttattcaacagctggatatggtcaggtgtcagcactatggaggtggagaggtcatttcccttaaggaggtcaaataatggtgtcagatctgtggcaatggagatctaagaccacacccatttaatttctcctaaaagcttttgtaactgtgggagggcataggcatttttaatttgaagttgaagcttaataggggacacagcatccaaggacaatatggagcccaggatcttaaacggctccaccttttgaatcttttcagaagcaacccaaaaattatatttaaggatggagagacacttatcagtaaggtcctggaggcccatacagctaggggcacccaaaataatatcatccatacacatgtaaaatataatattagagtcatctagaaagggtgaacaaatattaagcatataatatgacacatggaggcacggtgctattggccatggctttgggtagaaccatccactcaaacctagaatcaggcccaccaaaattaacagaaggaacagaaaaggcaaacttctcactatcttcagggtgtaagggtgtaatttgggggcaggaataggccactgctcaacccatatgggatctcctggtttctagtggatcttgtgtgtgtgggggggggggagggggggcagcagtggcctttagaaatgggagtgagacgaagggcattgttggcgtgtcttctcaaaatcagaatcgtctctatcatttggaaacactatctttccctgttcaaaagactgttcatactctcctgtattcaaaaggtcataataaaacttaaaaaaaaaacttatgttatgtatatgagtacaccattgctctcttcagacacaccagaagagggcattggatcccattacagatggttatgagctaccatgtgcttgctgggaattgaatgcaggacctctgaaagagcagtcggtgctcttaacagctgagccatctctccagccccataatgaaactttttataatcagtggtaataaaggcctcagactccccaagtatatcttggctcagaaggttagccgtcaggctagaaaccatgagaggtcacactttaccacgatggccatcatggtcctcccaggagagccaggaggcagtctcccatgaggtctattgtctccccatgcccaataagggcgggcttagaacaagctgcagagagtggggacttcctcctttctaatcaccattagatctctgagtgtcaatgaggaaccagaaagcttttccgcctatggcaagggtcatcttagggtggagcccagggacaagaggcacacagtccagttagcactaactggaggctcccctttatttagcagggctagagtttaaaggctgaccatttaggttgaacttagacttacagtgctggtccagtggaagccctttttgcatctgggaggaggggttcaaggggtgttatgttagtagatgggttggcactctttgagaggttggggcactctatcttaaagtggccttctttgccacaaccaaaacaagtcttcccctggccgacagaggtctgttgtagggtatttacaaggatggccgtgtcttctttatgggcgacaggaggaggtggagcttacattctgcaccagcgatctgagaaagcgatctcaaagattgctggtggggaattttctctttaggcttttatgaaccctatcaataaacaaggaaggtcctcagtgactttctgattaattcccgaagtcggggattcagccggcccttcatcgagcttcttccaggctgctaagcctaaggctcaatctgatcttgatgagggggaatggctgcttgttggatgggcagagtactgatcagcagtgccagcaagcatgccagcagtgatggggattgggggctcagcactttggttccactcctgctgaacccgacgctcttcttgaaaataggcagtccatttacagtaggccgaccctgagagggcagccttagccaaatccttccagtctcaggcaacccaggccctcaaggataatctcagcccagggggaattggggctgtcctcagccactgccttcttcagttctttaatctcttgggggtcccaaggataccaagatgctggccagggttgacattcactgggtaaaggctggtggcataccgggtaccgagcccttccctattgtaaggtggcggggcagaaggcagaggtgcaggaagaacatggaaggggtcagttgggaggggtgtccaagggaggtggtcttggggctgggggtctactggaggaccaaagggtgctgtcaaagggattgagtgagggatataggatatagggtctcagggcagtgggggggtgggggtgggggtggttagacctggataagaactgccccataatttatggcggtacacttacctgcagacagattgtgaaagaacctagtggggaaacccccactcaattctcgattcagcgcgcacccaagaatcacgaacagaccaccatcttgatgtaaaagcatgaggtagtttaatgacggagctccgggccgacacatatctcccgcaggagacagaggtgtcgaccacatggtggagccataatggcggagctccggttcgaaacggatctcacacaggagacagtggtttcgaccccgacgcttggaagctaggggtttttatagaaaaggtgtggggctgggggaggaattggtgcggtttcacatgattggtccatttaaacatcaacagactgtcagaagggcgggagatagggaggcactagggcagtcaggacatgtaacgacgggcctgcccgggcatgacctggcctgttctgctatgttctcagccccaggtttcaaagctcacaaacaactctttgggctatttgacataaattgcatgaatcacaggtctcaagttttatttcctttcatttggcccatcagtgttcttctgtcaggagggaggggttcctcacctggaggaccagtctgctggctcctagctgtcaggtccaggaaagaggagagaggtcccggtcctgccggggtctctctgagcctgagcaggatggcccaaaagaaacgcaccgagctgggagtcttgatgaagcaggaactcaactttatggcatcagcctcttgcttatataggttgggaacatagggaggggggttttgggtggggtaagatgacatagaaggcagggaagggtgacggagggtatggagtgactgatggggccaatggcaaagctctacatcagcaatggtggggcagaggcagggccaaacaggtcttgctgagtcaccccgatatggaagtgactgagacgggtctcaaacctcgagtcaggctcgggtttgtcctcaaggcccaaaccaggaccaaaatggggcccaacattgcacgtgttgatttctaggggtagctttacagattgtgtttttgagcacttggttctcagctgatggtagcatgggttccggaagggtgtcggacttcaggaggaagtggatcccttcggtgggtcaggggcttttagagcctgccagcatttcctggtcactctgcttcctaactggatacagtgaccatatggcctcaggcttctgcttccatgcttgtctgctgtgctggggctacatgccttccagatgtgagccaaaataaatgtgtctttaaattgcttttcaccaagtgtctgggtatgtgcatagttacctggaactctgcttcacgggatccagccagcctcctcctctggcttctgagcactacacacccatctccacctgaaggagggatgaaggtccccgtgatcacagaaaagcactatggaaaccagcaatggtaaacatgtcatccctacgatgggagagacgtataaacccagaagacttgggactggaggcggttggtaacctccatgctgtgtgcatggccaggccacacctggctctcccaggccctcatcttgagcctgtgtattacagtccatctacgacactgtctgcccgagacccttacgagcattgtttagatggagcctgcttccctacttgtctgtagaacccatctttatggaagatgtcacgtgtacgagttggatgcagacatgtcttaagtttagttgggcacatgggattgggttcatcatcaccaggaaacgtttccaaattgtgctgtgcttaaatatgcctacagtaaacgctggtgtcaggctgtcgcactaacactggctactgagtcctgctgagctgggtttccttcttcctttccctggattgacagctgctggccgtggtatttgcagagaccccctacatccacaccgtttttttacttttaaaacaaaacaaacgaaccctaaccaaacagtaagaactggctcggttcccgcgagtgaaggaagccagagagagagagatgcaaatctgtatctgctgatgtaaatctccgcagaagtccctgagagggtcaccctcaaagcccttctgagccactcactccacagtgaaacaaggacacattgtattaagccatcaagacagctgttactgtctcaaatcttattaactgatctagttgaaaaaggagaactccaactggctttttattctattcaggtttttgtgttaccttaaaacctttcatattagttactttgcatacctaaatgaaggacaaggatactaatccctcagggagcaagatgtcccttccctgcgacctgccttaacttcctaggaagagtcagggaattatgctacgtaagcgaatgaatcagaactgccttcgcagatcagatgtgttttcacaaagaccgctcagattctcgagatgttagagacacggtgaaccatgcctgtttgggctggaatgtttgcaaccttgcgtgagccctcctctcagccctgagtctaatatacccccaaaaccactttacagtctcagttacagaaggcaattctttaagaactttcagtaaagtagctcacagtgactttgacagat

SEQ ID NO: 622 - DNA, 3343 bp, Mus musculus
gtgggttgaacgttacggttagatggtggggacctcaagctggaagaggagttcgggtccactgtatgcgaagaaggagcgtacttcgggaggaattatgcttcagctaaagtcacaacagacgggcattgccctgcttgtagagcgaaaggcaagctaagtgccttaaaaccttaccgcattagcttccaagaatctgtctttctgtgtgaggatcttcagtgcatttatcctttgggctctgagtcacttactaatttaatttctcctgattcagaagattgtcccactccaagtaagcctcaaaaacgaaaaagattggaaaccaactgtaggaattcacctcttccagtacattctaaaaagactagaagtcacattgtcactgatagtgaaccaattgtgaatggtaaatataatggagaagtgtgtgatgacttctcagcaagcttcccagataccagtgctcaccaggatcctgccagcacagctgcttctgtggagcagagtgaggctttggaggctgatgatgtggttgtggccgctacagaagatcctgctacagttagtgtcacatctgagctggaaatgccagctaagagcagatgtttaccactttgccagactctgtgtgtccagtggaaaaacacccaggccctgtgctggttagactgtatcctgtcagccctggtgcacttggaggtgttgaggaagactgtgctggaggcgtgctccagggaggagtgtgtatttggaaggctgtttgaaatgtaccaccaagcagatgagctgctgcacacccatcacctgcatggcgtcacaggtgaagattgtaaaaaattgacatcagaaatatttacagaaatagatacctgtttgaataaagttagagatgaaatttttgctaaacttcaaccgaagcttagatgcacattaggtgacatggaaagtcctgtgtttgcacttcctgtactgttaaagcttgaaccccatgttgaaagcctctttacatattctttttcttggaattttgaatgttcccattgtggacaccagtaccaaaacaggtgtgtgaagagtctggtcacctttaccaatattgttcctgagtggcatccactcaatgctgcccattttggtccatgtaacagctgcaacagtaaatcacaaataagaaaaatggtgttggaaagagcgtcgcccatactcatgctgcacttcgtggagggcttaccaaggagggatttgcaacactatgccttccactttgaaggaagcctttatcaagtcacgtcggtaatacagtaccaagcaaataaccattttataacatggtttttagatgctgatgggagttggctggagtgtgatgacctaaagggtccctgtgctaaaaggcacgtgacctgtgaagtgccagcttcagagacacatatcgttatttgggaaagaaaatcccaggtgccaattgaagaagctgcctgccttccatgcatgaagccaaatgtgcagcctgtatcaggcgctcctcagactcttccagaaatccaagctgtagctcatggagatagtgtactttcaggagcaaaaggcatggtcgacagcattttaccctcagcacttgaagaaaccatccaggaaactgcctctgtttctcaggttgactccaaagattgcctgttggaagacaaacccgtggcaggaagtgcagcactggtcagagtacttgcttttcagccacaggactccccggggtcttcggggtcttccttagtgtccagcctgtgtgaaggaaagctagttgccccatgtgtggattcaagtttcccatcccaagctgtgagcacagacctgcaggcagtactgtcccaggcaggggacactgtggttcctaaccctgtgactgatgcccctgttcctgttcttgttcaggaattgaagtccctggcaactgagaaggactctcagacacagttgctgccactgaaaactgagaagttagatcctgagcaacctggtaaatctcaggcatctaatttgagaaaacgagaaaccacagcgtcttctaaaacagtagcagccaggtcagcacagaatcagcctcggaaagaagatcagaagagagccttcgtgggaagttgggtgaaggggctattgagcaggggtggtgcttttatgccaacctgtgttttgtctcagagtagagcagtaagtgacctgcaaccttctgttaaaggagccagtaattttgatggctttaaaacgaaaagtataagccgcaggtctaaaagaatgtccaggaaagctaagcacatggaggaactgtctccaaggaacagctctccaccattgagctggacagctgctctgacccaggctgctgagaacgccacctcagctctgttgagggagcaggaaggctcacgtccagctcccctcaggcacagatctcctggcaatgaaagcgccatctctccagcaagccgtggagatgcggctgaagatcaggttcataagcttcggctcaaacttcttaaaaaattaaaggcaaaaaagaagaaactagctgccctcatttcttccccgcaccgtgaaccatctctaagtgaccactcagagcctgcgtcccattgtggaacacctgcaagtgaccagtcagagcctgtatcccattgtggatctccaaatgactgtgagtccatagaagatctgttaaaagagctacagcatcaaattgaccttgcagacagcaaatctgggtgcacctctgctcctgatgccacctcaaataacagccagagtcatgaggagattttagcagagttgctgtcgcctacagccatgtcagagccctcagaaagtggggagcttgagttgaggtacttggaaatgggggacagcaccccagcacaagcacctagtgaattcagtgttgtctcccagaacacatgtctgaaacaggaccatgattactgcagccctgagaaaggccagcgggaagttgatctgcattcagtcatggacagtgcctgtataagaaccttgaacttggggagtcccatgaagactgatatctttgatgattttttttccacctcagcactgaattctttaacaaacgacacattagacatacctcattttgatgactctctgtttgagaattgctgagtgcgtgctagtgttttagttaaatactgaccactgctgctaggaggctgtgcctcttgggtagtattggctgaaatgcatagccttgtgttctagccatgggaagctgtgagctactggagtctgcctgtgagacatgagatctactgcaaattaaagacctccgcccagt

SEQ ID NO: 623 - protein, 1047 aa, Mus musculus
TLRLDGGDLKLEEEFGSTVCEEGAYFGRNYASAKVTTDGHCPACRAKGKLSALKPYRISFQESVFLCEDLQCIYPLGSESLTNLISPDSEDCPTPSKPQKRKRLETNCRNSPLPVHSKKTRSHIVTDSEPIVNGKYNGEVCDDFSASFPDTSAHQDPASTAASVEQSEALEADDVVVAATEDPATVSVTSELEMPAKSRCLPLCQTLCVQWKNTQALCWLDCILSALVHLEVLRKTVLEACSREECVFGRLFEMYHQADELLHTHHLHGVTGEDCKKLTSEIFTEIDTCLNKVRDEIFAKLQPKLRCTLGDMESPVFALPVLLKLEPHVESLFTYSFSWNFECSHCGHQYQNRCVKSLVTFTNIVPEWHPLNAAHFGPCNSCNSKSQIRKMVLERDILMLHFVEGLPRRDLQHYAFHFEGSLYQVTSVIQYQANNHFITWFLDADGSWLECDDLKGPCAKRHVTCEVPASETHIVIWERKSQVPIEEAACLPCMKPNVQPVSGAPQTLPEIQAVAHGDSVLSGAKGMVDSILPSALEETIQETASVSQVDSKDCLLEDKPVAGSAALVRVLAFQPQDSPGSSGSSLVSSLCEGKLVAPCVDSSFPSQAVSTDLQAVLSQAGDTVVPNPVTDAPVPVLVQELKSLATEKDSQTQLLPLKTEKLDPEQPGKSQNLRKRETTASSKTVAARSAQNQPRKEDQKRAFVGSWVKGLLSRGGAFMPTCVLSQSRAVSDLQPSVKGNFDGFKTKSISRRSKRMSRKAKHMEELSPRNSSPPLSWTAALTQAAENATSALLREQEGSRPAPLRHRSPGNESAISPASRGDAAEDQVHKLRLKLLKKLKAKKKKLAALISSPHREPSLSDHSEPASHCGTPASDQSEPVSHCGSPNDCESIEDLLKELQHQIDLADSKSGCTSAPDATSNNSQSHEEILAELLSPTAMSEPSESGELELRYLEMGDSTPAQAPSEFSVVSQNTCLKQDHDYCSPEKGQREVDLHSVMDSACIRTLNLGSPMKTDIFDDFFSTSALNSLTNDTLDIPHFDDSLFENC

SEQ ID NO: 624 - DNA, 61765 bp, Homo sapiens
cacagcctaatctctagctagcaaattttataatatatataaaaatacaattatttcacaaaattaccatgaaacgattttattgggatattagacattactgaattacttgttctgtgaggtatacagtgaaattaacatgttataaaattgtggtagccggcccccaagatggcctccaatgaatccttcacctcttggtattcatacctttgtgtaggtaggtctgtgtaacccatagaatacagcacagtgacagtaggtcacttccgaggttaggttgtgaaagacactgtggtttctgcctctctctcagatcacgtgctctgggggaaaagccaggtgtcattttgtgaagacactcaagcagcctttagatgactgcaaccacataagaggctccgaactggagccactcagctaaaccactcccagattcctgaccatgtatcatttcatacacaatgtatgaaatgacaaatgtctgttgttttaagctgtttggggaataatttgttacataacaaaatataactaatacaataatacatactgatttaactgaagttgtaacttcataacttatttaggtactaaaaatcacagcaacccgatgcaaagtactaaaaaaaaaatccattaatacctattgagtactgttgagggcatgaggaaagctctttcatactccacataaaacttccttaccgtaatattcatggctgacctctactcttaactcctttctaggataggaggggctaactgatctgacagcaagtttgggagaaaaaattctgaggctcggccaacttcctctcttctttccatttgggatttggctgactgaagagggtcatttgttttggcctgctctcttacacagtaaatgtagtgggacaagctctattcttgttgatagaaaaactcgaattttaaatctgcctagttctttgcagctcgttgttgctccaaatctcagctaccttttgaaacaacttttttcagtaaacttaatttcaatcttcatgtgatttaactggatccaaacacaggcagataaaaaaggtggggcattacttatcaacctctaaactaagtttaattttgtgccctcatggagtttatagtatatttgaggtttaaactaaaacacctggttttaaacagaaactataaaaaacacgattaataggtgaggccgggcgcggcggctcacgcctgtaatcccagcacttggggaggccaaggcgggtggatcacgaggtcaggagatcaagaccatcctggctaacacggtgtgaaaccccgtctctactaaaaatacaaaaaattagcccggcgtagtggtgggagcctgtagtcccagctactcaggacgctgaggcaggagaatggcgtgaacccggaaggcggagcttgcagtgagccattgcgccactgcactccagcctgggtgacagagccagactccgtctcaaaaaaacaaacaaacaaaaaacaaataggtgaaaggccgtgatcattggtaagcgtaagaaaatctgagggagaaaaaaatatagatgcccaggccccatgccaaactcatggaatcatgcatgaaacccaagcagctgcagttttaacaagttcccaatatatagttgacccctgaacaatgcaggtttgaactgcctgggtccacttataaaatggatttgatttttttcaataaaagttacaccgagtgtgcctgcctctcctccctccctccctacatgctcctgctcttaagcctctgccatgaggcttaagacagcaagaacaacccgtcctgtttatttcaatagttttggggggtgcaggtggtttttggttacatggataagttctttagtggtgatttctgagattttagtgcaactgtcacctgagcagtgtacactgtatccaacatgtagtcttttaacccccatccaaccttcttccccaacccgaatccccaaagtccactgtatgattcttatgcctctgtgtttttatagtttagctcccacttttaagtgagaacataccatttttggtttcccattcctgagctacttcacttagaatactggcctccagctccatccaaattgctgcaaaagatattatttcgttcctttgtatggatgaatagtattccacgatgtacataaacattttctttatccactcagctcctcttcagtctactcaatgtgaaggtgacaaggacgaagatctttatgatgatccatttccacttaatgattagtaaatatacttacttttccttatgattttcttagtaactttttttctctaacttactttattgtaagaatacagtatataacacatatgacatacaaaatacgttagtcaacaatatatgctatcagtaaacttccagtcatcagtgggctattagcagctacgttttttgggcagtcaaaagcatggggaaggagagggtggtccctaacccctgtgttgctcaagggtcaattgtaataatacccatttaagaatccatggtatatatggtaagtgcaacaactctagaagagagtgctaggagttggaaaaggaaagagaaaacagaatttaaagcaatctgtaaaggacatgcagggtttagatgaggtggaagggtgagggaaaaccaacatctgctgtgagggcatattaactgccagacattgttctatgtcttacctcatttaagagaatttcatttcacacatggaaaaactgaagcccagagaggttaaataatttgcctgaggccaaaattagttaaataacagaagtgggattagtagatgttttcattttatcagtgaaactgagcctcagggaggttaaatattttgtatgaagtaacaaaactgagattaatatatggccaagtttaaatgagatctgtaaatctaatgcctacactaaaacaaaaaaaaaaaagtgggaagaaaaggtctatattgcttagcaaaacagaggtagggaagcaaaaataaacttacaaaatcagattagaccaccaaaaaacagtccccattttaacttatgtggtgagaaccatatattaaagaccaccagtggcttaaaaatctttttaaaaaatgaatctgttttcattattcattagtttttatctaatgaataatgtatcttaactgatacatttactaaacaattaccagctccaattagcactcagttacaattcaatcattaaactgaccctcaatttagctgtcaacctagtcaaaacagttaagtgattttacggtcatcctcagttgcagaagtataatgtttatggctggagtcattttatttttaactaacattttttaaaaagattgctttgtaacaatgtgttatgagtcctttgtggtaaatactgctttttttttgagacgcagtctcgctttattgcccaggctggagtgcagtggtgcgatcttggatctgaggctcctgcctcagcctcctgagtagctgggactacaggcatgcgccaacgtgcccagctaattttttgtttttttagtagagatggggtttcaccatgctggccaggctggtctcgaactcctgacctcgtgatctgcccacctcggccttccaaagtgctgggattacagctattttaaggactttttaaaaagtgaagctaaacatttattcatccctattcctcatctatagggacttgtgctctatttttctttgaagactgaagtaaaaattcacctttgtgagggtcttcctataattaaaattaatcattttttcctccatagcttctacaaaacattgcctgtacaactctatttagcacttatttcatcccgccttgtatgaaaactatttgtttacaaacgtttctacttctctttaggaataaggactatgcattattcactgttgtattctccctgcatttatggcagtcctttgcacattaaatacaagctttttggctctgtgcatctcttcatctggctgttcatctgtaccctttaaaacatcctttattaaaaaaacagtaaatgtaaaaaaaaaaaaaagccattgatgaaaaagttaatagctttctcaataagaaaagagtatcaattatgcatacgtctgaactaacaaacatgaatgaaataggctatttaatacattctgttttaaaagtaggtttggtcagccatgtaaattgaaaattgggagccaccaagataactcatcaacaaatatgcactatgtactaggcactatatagatgatggtgaaccaaacagatgtaatccttgctcttacagatctcacaacctactatggggccaaaaatatatgtgtatgtgtgtgtgttatacatatatacacacacatacatgtatatatacatatacacatacacatatatacatacgcacacatacacatatatacacacacatacatatgctatgaggaaaacaaacaggtggtgagaaagaattagagtaggggtagaggacagagggctcctcaaatagggtggacagcttgacacaagacactcgagctaagactccaaggatgagaagacagttatgtaaagaaaaggggactagcattgtcagcaggtagctaaggccttaaagcagacagtcatgtgctgcaatgccagcttcaagcgaatacagttactaaagcatatctaaccttctatgtgaatgtagttactaaagcatatcctccaactttccatttttcttttgctattgtttctaccacttctccttttctgttgacaattattttaaatttcctggctaaattaaatgatggcatgaactctggggaaagtaagactacctatgtccaaataatcctaaattccttctagtccttatgactgatcaattcaccctgaagtgacaactatgtcccaattaggaaagagtgtttctttatctgcacttaattttttgatttggaggcttcctgattgctaatcaacatgttgtgtgattacttcaacaagtacttatagaacgttattttgtcactggaaaaacgttctgctgctttctgaactttaggttgctctagagtctaggaagagtgactgtacctaaagcagttcctaattactggacattctcagatctgctagagctacatgtccaattacgagaatatactggaaaaagccctggattagaaatgagaggatgtaggttttagtaccaggtcagccaccttgttaatgcaaatttgagtaaattgttacttcttttaggccttgtttttgctgttttgtttttctgacagtatggtctctgtggtccaggctggagtgcagaggcacaatatcaggtccctgcagtctctacctcccaggatcaagccattttcatgcctcatcctcctgagtagctgggattacaggcatgtgccaccacaccctcgaactcctgacctcaagtgatctgcttgcctcagcctcccaaagtgctgggattagaggtgtgagccactgtgcctagccttacacattgttttcttactggtaaagtgggaatatctagaagttgcatgctacataaattcaaccatatattattggcaaaaaattttaaagaaaaacatcagcttaagagtactaattgagtacatgccttggaatgagcatgagctggaaagaacaaacctgttgttacatcactcattgctgttttcatatgctgctcattgtaaatcttgctcagtggcatgattttagtgtttaaagatttatttgtttgtttgtttaggacaaagtctctacacataatctacttgcttcatatatacatacttatgcatattatgtatgtacatacatgctctcagggctcacatgaaaaaacagccattcaggtgatgtgatttatctcatatgcttactttagagtcaacagggtgttgactccactatacaatactggcatagagaacacataagtcaaagtagacaggacccagccgtaccattggctagggcacaaatatattcacatatgtggagaatgatgtacgtagaaaggtcttcattgcacaatgctctttaataaagatctggaaaaaaaaaacacctaaatgttcaaaaggatagggtagatgaaataatggtacattataaaatggaagattatgcagccataaaaataaggaaataccttaaataataacagaacaacttttaaggtaagtgaacaaataaggtacataatcactatgcatagtatgtaccatttacatagaaaaagggaagaaaaataaaatatatatagtaatttatttgttcttacatgtgtaaaatttttctgaaaaatataccagaaactggtagcactggttgcttcctaggcagaaaatgactgagtatccttttgtaccttttgaattttgaaccacgtgaatgaatgtgttacctatgaacaaaatgacaagtttagatcagcaagacagcagtttgagatgaaatgggattacacccttagtaggaaaaactttttaaagcaggtggtacttctaagagcaaatacctgcacatggaatgttgaaactataaggaactctccttaagagatccatctattccaaacttctcattttatagatctgtaaactgagaccttaaaaattcagtgacttgcataaggtcacacagcagaagagatgggattagatgctagatattccaatatcaagtttagactattaaaaattcagtgacttgtgtaaggtcacacagcagaagagatgggattagatgtcagatattccagtatcaactttagactattatcacaccatcttctcattttctgggggcaaaacagaaccaagtaagtttgggctacattacgagttgtcatgtttttgtttttgtttttttgagatggagtcttgctctgtcgctcaggctggagtgcagtggtgtaatctcagctcattgcaatctctgacccccggggttcaagcaattctccctgccttagcctcccgagtagctgggtttacaggcgcctcccaccgcgcccggttaatttttgtattttttttttttttttttagtagagacggggtttcaccatcttggccaggctggtcttgaactcctgacctcgtgatccacccacctcagcctcccaaagtgctgggattacaggtgtgagccaccacgcccggccgagttgtcatgttttatctaaattttagagtctaatgtataaattaaccttaagccctgaaactactaatttcttgtttggatcactatacggctacacttaaaaatatgctgtgcatacctctatcattgcatgtatacaatatgatagatgcatgatatgacagacacacaatatgatacacgtatttttttctatcctaacacatctgaatttactgaaataactaaaatgtcttaagttacttttttaaatatacacatgcatagcacaagcgtgttgccaaaaatatgaatacaggtttacaattccttaactaaaacccaagggttggatgtgttttagaaataagaatttcatacaatttttaagtgttacagggtatataaaccattatataacacataccaggggccaagggcagcaccccataatcaaacatattaatatagtttcagcaaaacacatgggataaagactatatacagcttctcaatagttcaggtcatattttgctaccaaatgaattttgttgccaagcttaagaagtttttggttttcaccgctttctgaatgttagattgagatgtgggattacagactgtactcatagagtgcttctagaaagcagtcagtcacttcaactctcattttttttttatgagactaaaaaagaaatcatagcaagtagcttttatatcccaggtttgggccaaagacttgtattgtggttaaggaatctaacttagtagaaggtgcacgagctgacatcgtgagtggctaaaatgagagaaaaaaagagaaaatcctaatcatacagaagcactgaactactgcagctgttcgttagttattaatttaataaaagcttcctccctttaaatcatgtgagtttataactggaaataggtcaataaaatttctgtcccacactgctgacaagcgatggacgcaattagctttaatcccactggaaggtactgcactctctctgggaccaggatatgtagaaaaaagcatttcaaatatataggaataaccagaaatgtatacagtattctcaacttgggaccgttactctataatataaacgaaaggggttttctagtcaatctctgctgatctcctgtaccaaagttcttccctttataagtcttgtactaccttttacaagaggaaaaagctctagagcgaaaacacagaacacactaaaatcccttcctttctctttacaactcaagccccgcctccattttgtttctgttactaatttttcttctgaaaaaataccaaatttacactgaaagactaaaattcaactttgcagacaacgttttaaaaaatacaattcagtttggtgatgttgttttgcagtcttacaattttagctacattttaactgaaccaattgttttgttcaatttatgagttaatactcagcaagtttgttttttacaaatagtgtattccattctaaaaatggaagtagcagtggtgaacaagaaaacaaccctctgagttttgtctatttcaggaggaagtactactttctccaattttaatcacaattcataaaaaagaaaaacctaactagctagatcttaaatatacaaatacattaacaatctagtaaagcaacagaaaaaggtaaacaaactaaccagcctatttttgtctggagaaaccccaacaaactgctggattccttggccatttgcattcagaagtaccaaaaactaaaatcctttttactaaataatttcttctacacgagacttgtttcctccacaccaccctatccaaattgtcagcattattccagaatataatcatttagtttgagaccactaaaaaaccccgcagtccaaaataccaattgtggtttttctgtaaagaaatggtcagaaactacaaattgttatcctaggacacagaaccaatcgaccaaaaggacttctggaatatgctgcccccaagatttagaatgcacaggcagaaatagcatacgcggtcacgatgtcccttaagccacatgaccttcctacgaaagcaaaggcttaaacttatcaaatgagaactccccctttctctgaagttaaaacaaggcagggcagctggaattagagcagcagggacagatcggctgttgactagtcagaacgggtcgtggaatgcaaagtccctgcgctttcgctgctccccttaccgtgagaagatctgggagggaggaaaggaggagaaacaccccagaatcctggtagaaaagcccctggcctcgaagatgggctctagggagacagggaggggcagctccgtgtgtgatgaccctttgtgaacatgcactctgtggcagcttcagctccaccgaggctttgggagagcggactacggatgcccggcgcggcccagctgtgaaggccgcgccggcggagagggtccatggcacccccgccggcttcggaagcccttccctctcccacctccgcgggtcaccccaggaaccagcggctcccgaccacgctcgcgcggaccacggaacagcgacgcgcaagcaggtctctttcgtcagcgtaatccctccgcagaaagccgcgcactagttttaatcacgccccaccccctggccgctggcgccacctccgccactcgggcgctttccagcagcttccagaaacgtcgcctccccaaacccagccactcacacatggcgggctcagcagccaccggccccgcccctcctcgtcgccgcagtcgcaactgcgtctgcggccacagggcggacagccacgcctctgcggagggcgaccggaagtgctcacgtcttcaccttccccgccacgccaccgtcctttcaggcccagcgtgcagcaggaaggaggactcttttgccgcggactcaagccggaagccgccttcctagtggagacgcgagtgggggaggagcagtccgaggggaacgtgggttgaacgttgcaactagggtggagatcaagctggaacaggagttccgatcgacccggtaccaagaaggggagtgcccgcggcaggtaagggagaagagggaggggtttctttccgctctcgaaattgggaaaagagacagagctgggatgacctatggggtagtcggcgcgctgaaaggatgggctgggctgggacggggttcaagtgggaaaggttgatgattaaggtatagagttggacttacagatccgtttgggcgcagagaggtgaacgctgaagagaaaccagagtttgttttcgttttccaaggagcgtggagatgggcagggttaacggaccctgcgcctccttcggcttcttagtttgggtgttgaaactcacctcctttggtcctgttcgtctctgattcaagacagttgggtttggtacctgacagggctgggtgcagaaagctgaccctgttcctcggcttccaggtcggttgtggcctcgcttttgacagttcacgtgccgagcctactcgctctcggagggcgagctcaaatgggtgggtttaaggccccctcttcgaacagctgtttccctgggtttctccattttgcacacaggagtgtgaattaagtttaattgaatactttttgcgattcccagggccaccttgacacgttcattgtgctatctaactgggttcatgctgggctaataattcacattaaggcttctggagtataagtggttcacagaagtatgaaaaggggatgttagaagaaagatgctgggggtgaagtagagttgaggaagacagaactggaaagctaggttggtttcacagtacaatgagctttaggtcataatactacctttaggttatattgggctgtttggacggagtttgctgtaatcaggctagagtaaatagagaattttaaactaagcattgacaggctcagacttgtagaggcatcattttgacagtgatatggaagggaaagaggtagagatttgagacctttccaaagaactgtccacagaatttggtgacttactgtgcgaagagggaaataaagaatagggaacaactcaagactttctagtctgtgtgtttggaaggatggagacgcccacatttaagtgagatatgggaaggaggagcagattgtttttgaagggaggaagagcagttacttagggtcaaattaagttgtaaaatcccccccgggattttgtatgtaagtcaaagtgaattgtatttggaagaagaactggggagcccacctctggtattttttttatgtccctcatatggacaaataaacctctggtattaaatgaattttcttttgggggattctatatattcgggatttcaaccaccaacctatctggtttttcccgctgaaatgttgggtgatggaatcaggagagcagatttggagactctttatattttataattgagagagacaaagagaaaaccgtttgatttgaaaaagttttctaggttccctcaggtagatggaaattttcatcaaaaacagtttattcaaggtacatagcctactagtttcccatttgagagtaccgcagaatgatacgacgtgtactgcttctctacgcagaatgaagtataaaattagcaccaaatagtaactttaatttgtcaggtgctaaactttttacatgctttatctcatttaattcttagaagaaactaattttacaagtaagtgtctggaccaacatctgcaggtacaaagcctgaaaagcgtaagtttgactcctacatagttctcttttgtaagtagattataaatagaaccagccaaaggtaataagttgtctgtgcctaaaaagaaagaaaaaagttagcatcagtagttctcaccagaaggggtgattttgcttaccaggggacatttggcaagtcaggaaacttttggctgttggatctagagggtaaaggtcagtgacgctgctaaacatcgtcagtgcatagaacagccttcacaaacaattatttggtcaaagatatttgtagtgctgcagttgagaaatttctgtcttatggttatttcttcaggaataggaaattaagattcgccgatactttctttaaaaagcagttttatttttgaaattattccttggcttgaaaggtttgtgaagtttatatagccgaaccagaatagcgtaattagattttaaagtgaattgtgagccatcgattcccaggagatgggtgtcatagaatcatggattcttggatttgggaaagacttatgcctagaattattttacaacatttctgctaagtggtaattctcctctgccctaaaggtctcctgtatttgattttcctatcattgtgaacccacaattaaaatgctcttaattattttttgcttacactgagctccggtctcttgtaatttttactctgttaaatgtagttctgcaccataggactgcactcaaaacaagcttgccacatatgtaatttgtactaggacagtgtttatatttttgttcagataacaaaataagttaaatgtggtgtaaattagatcatttacaaataataatttgttagcagcttttaataagtagtatttttcccaactggtgaagtattaatgttggtagttgaaaacaataggaatgtatggaatatatggttcactggttcttttgttcctgtcaaatagtggcacaatggatctggggtttttctcagtataatgctggcatatttgtttcaaattgtacatagactctaaaaagttaggctttcaaattctggtcaatatagtttgctttaaatagtagctgcctctactacaagttttatttaatttgttgacaaatgagtctgctatgaaaaccggtcctgttgccagtcactaccctctgttcacaaatttgctgggtttataaatataggtatcattttcacttcaagattataattttagaatatgtttattctaggacatatagccctcaaaatctgcttactatatacgtcttataaaatagcatggttcttttttatagtaaatagaatttttatttaattgtctattgactttttttttccagggttcattgaaaaaatccttagtgatattgacatgtctcaagtgacataaattagccaatgactcggaatgatggattctccgaagattggaaatggtttgccagtgattggaccagggactgatatagggatatcttcactccacatggtggggtatttgggaaaagttagtgaacttattttttgcctgagtgcaaagttttttttttttctctatttttgagacttaaattcaattttgatgttaccagttaacttctaaaaaattgtgtcttccacggaaatcttacagtaatggcgaaagattgttttaatgtgtttacctttctgtgttttattgatacatgaaagtggaaataaaacatagaccttatgatttactgttctttgaaaatatggtacataaattctcccgggtagttgatgttacttttttccttgcaaataaaattgatactattcttaacacataaaatttaatatttaaaactataacataattctttttggaataatagctgtatttaaaggcttatatgcatttcttttgtttgccatgtttaaaataccttgtcaggatacttgtaattgaaaattataattttttctggttacctttccatttaacttttaatattttgatatattctaggaatgtctatattttaatttgctttatttctcttttagaattttgattcagctaaagttccatcagatgagtattgccctgcttgtagagagaagggaaagttaaaagccttaaagacttaccgaattagttttcaagaatctatctttttgtgtgaggatctgcaggtaaagtattaatcttatatagtatatataagatttttcttttttcttttgcttttttattaattgttttaaaagtttactcattttttgttttttagactagatttttaatatgtaatctcagtttgtaagtctgtctggtatacaatgttatttttccacctacctttacttggttgcgtaaagatgttcgtttttattgccatttgatttgcgagaggagaaaatacatttcaaggtttttttctttttttttaaccttttggaggtccttgttagctattagcatatagtagttactctctcatctctttggtttatctttgcaactgatgggaaaagttatgaatttctaatgtacctggaagagtattttggaaattggttagtccaaaaccagtatatatactctgaactaaagagagtatagaatcttgtaaattctaaaagatccttttagaagctctaaatcgcttttagaattatagtaatttgtaccgactggtacggcttttatatagcagctcattaaattctgtaatactccacattttattgtatttgacagtttatgagactgtctcatacacttttaattctcagaactttgcaagatttgtattcctatttcatgaataagaaaataaattgatttcagagggtttgggaacataagatcctgatacagtggcagagctgtggttggaatacagacttctaatttcagatctgtttattccagcaaaaaattagcagttcatcagaattacctggagtgcttttaataaatttctgagtatcacccccagatgctgattcaatagagttggcccagaattctgtggttttgtaacatttgaggatgagtctgatcatcatcagccaggtttggaaaatactagactaaatcacatggttgttaatagatacttatgctgggtataatttgaagtaaagtaatcccaggcgtgtctacaaatataaatttctttatgtttatattcagtaattttttttatgagtgtcactgtttggcactgttgcagatacaatgttaggatacaataataaaacaaaaatttcttgcccttaaggaagttatgtcatagagtgggaaagacagtgaacaagtatgtgtttttctgtcaggtgataaaaagtgctgtggagaaaaataaggcagtagggactggaatgccaaagtagggggagtttgcaattttaaataggatggtgaggggaacgcttcaatgaaaagtgcaattcgagcaaaagcctgaaagaggtgaagagcagtgagctttctaggcaggggaagcaagttccaggaaggccctgagagaatggaggctgcctgtcatgtttgtgctactgcaatgaaagcagcagagcgatagaaggtggatcagaaaaataatgggggagctggaccaagtagggtcttataagccattgtaagctttctggcttttactatgggtgaaaccaggaaccatggcagagatgttggcagaggagtgacataagttgacttcagtgttaaaagcattactgtggctgcactgttgaaaatatatgtaatgggcaagacctgaagcagggagattagttatagtataatatgaattatatttggtccttgtctatggtttccgttacagagctaaaagtcttggaatttcctgaatgataagagtgtcctgttattcagaatgagcctgtttgctaacaccggggttcatactattgtggtgacttaggatggagccgtagatagcctcagatggggcaagtagctggaaagaccacatgattagagaattaacgggttagaacttttagccccacgtacaggcctccaggaaaggagtggaggggctggagatcaagctgtataaaaatatcaagatttggatttaatgagtgggttgctgggggctggtgccgtgtaggaggtggtatgcttagaggaagtggaagcttcatacctcttctgtcccataccttgccctactcatttcttcatctataccctttataatatcctttaggataaaccaataaacataagtaagtgtttgtttgagttctgcgagctgtccttgcaaactagttatgcccaagaagggggagtgggaacctttgtagccagtcagtcagatgtactggtggcctggatgtgggattggcatctgaagtggagggagtcatgggactgagccctcaacctgtaggatctgacatggtctctaggtagataacatccaaatggaattggattataggatacccatttggtgtcctctggagaattgcttggtgtggggaaaaagcccccacacatctggtcacaaaagtgtgctgggaggatagaatatgtgaaaattgtcataatcaaaatggagtcacttgtgttaaaaaagaaaaaaaaatcctgactggccaggcacagtggctgacaactgtaatcccaacactttgggaggctgaggcaggaggattgcttgatcccaggaattggagaccagcccatgcaacatagtgtggccttgtctctacaaaaaaaaaatttaaattagctgggcatggtggtgtgagtctgtagccccagctacccgggagggggactacgggtgcacggcaccatgcccaggaggtccaggctgcagtgagctgtgattgtgccactgcattccagtcaggatgacagagtgtgagaccctgtctctattaaaagaaaaaaaaaagacaaatagatccaggaaaggctatgaagagagagctttcatgcataaataccaaaatatctcaaaagactctgcaaaaaccacacccttgcacaaaggccatcatgaaatacttctgaaatacacagaaaatacatcatgaaataaatacacagaaaatacttctgcaaggacatctgcccagcaactgcctggtccatctgtggacgggtgtcatccttgttattgatccttgtagccaagggtaattatctcaaaacaagtatgtgatcctccttattttcctttaaaaaccttttgtcttcccttacctccctgaacacacacagtttactatggcatgtgtattcccattggaatactttattcctgaataaatgtcactttctttttagaagcttctcttttctttttatttagattgataagtagaaaggaaaaaaagcttttttccctttggactagttgaaggcagttgcagtattctgggggagagggtggtggcagaggtgttgaggcatggttggagtttatttatactttgaaggtaaagccaacaggatttgctgaaagattgggatatggggttggaaagaggaatcaaggatagttccaagatttttggcttgaaaaattagaagaatggaatcgtgaattactgagctgggaagacttggaagagcaaggttttggggagaagatcaggactgtaagaatagagaagtccttgtccccaggagttaggtttttggctattaaagttagatgtactacatagatttttagttggttttttgttttttgctttttttttttttttttttgagacggagtctcgctctgtcacgaggctggagtgcagtggtgcgatctcggctcaccgcaacctccgactccctggttcaagggattctcctgcctcagcctcctcagtaggtgagattacaggcatgtgccacccagcccagctaatttttgtatttttagtagagacggggtttcactatggccaggatgggcttgatttcctgacctcaggtgatccacccacctcggcctcccaaaatgctggggttacaggtgtgagccaccacgcccagcccggagttttggtttttgaagcattctttttcaagtgataaagcaaaaaatatataatcaagaattttaagtatatactttggaaatgttaaaaaggaacatgagtaatttattattatttttttaatttctagtcagcaatgagagcccagtgtactttatgaagtagattggtttacaccaggagtgagcagacattttgtatgatgcacaaacaaggaatgatttttttgttttttaaatggttaggaaaatatcaaaataaaaaatgccagaaaaaatcaaaagaagggccaggtgcagtgtttcacacctgtaatcccagcactttgggaggccaaggtgggtggattctcttgaggtcaggagttcgagaccagcctggccaacatggtgaaaacctgtctctactaaaaatacaaaatagccgggtgtggtggcatatgcctgtaatcccagctacttgggaggctgaggcaggagagtcgcttgaagccagtggcagaagttgcagtgagccaagatttgagccactgcactccagcctgggcgacagaggagactctatctcaaaataaataaataaataaataaataaataaataaatcaaaagaagaataccctttcataatatgtgaaaattaaatgaaattcaaatttcagtgttcataaataaagttttaccggaacatagccatgctcaatcatttatgtattgttcatggcttcttttgcatacaacaacagagttgggtagttgtgacagactatgtagctcataaaatctaaatatttattatctagccctttatcagtaaactttgctgatccctgtataagtcctctgaatcaaattatttccaaagagttccgttataaaatttggagtttactctgctgtaaattgcaaagaaccatttggaaaacctcttttagtcaggtatttacattaaaatgttccttgatttgtaaacactaatattcaagactggtccaaaattataccaaattgaaactctcaagtgtttttaaacagtaggaagttttaactttttttttttcgtggagtagtctatcattcagcgtttactttggaacatttaattagtcttttttaaaaacccatgaaatttataataaaaattttaaatcattaatgttgagtaatcaaagaaaactttttttgttttctccatttgtaaaatgagtacattattattataatttgtctttggccataccttgttgataattacttatacaagtataagaagacatggtatgttttcctttttcctatttcacaagaataagtacaggaatttacttaagctgctccaaaactcagtgaaagagacaggattaggtttttttcagcattggattttaaatgatactagatggttgcgctgggctaaaatactaatgctttgtgtatatttttatgacttttttgaagacagcttaaaagctttattctagttataaaaatgatacatgttcactgtaaatagaaacaagtcaggtatacagagatacaaatatttagaacatgtggaaagaggcaacaaaattttataaaaagaaaaaagataaaaatctgaaatcattaatttataagggaaaaatcagggcaaggacaaattatattacagattggcctatggtgggagcacagattatatagagaaaagtcagtgaagacacttgcgaagagtgtgggtggaaatcactaagttttgcagtcccggggcctcttatggtttattactgttttgttctttttttttttttaatatgcattcctttggaaccaagggtttattatgttttgaataaagtagaggtgtaagtaggatgcatataccatgatcttgactacttgagattcacaaagggttttcgtctcaggatttttttttctcttaaaaaaatttgtattaatttttaaattgtaaaaaaattcatcaacttaaccatttttatgtatagagttcaggagtattaggtatattcacttgtgcagcagatctctagaacttttttcatcttgcaaaactgaaactctgtacccattaaacaaccacttcccattttcctctcccccagcttctggcaaccattctagtttctgtttcttttctttttttttcttttgagatggagtctctgtcgcccaggctggagtgtagtggcatgatctcggctcgctgcaacttctgcctgcgggttcaagcagttctcctccctcagcctcctgagtagctgggactacaggggtgcaccaccatgcctggctaattttttttttttttttttttttgtatttttagtagagacgggggtttcaccatgttggccaggctggtctcgaactcctgacctcaggtgttctgcctgcctcagcctccccaaagtgctgggattacaggcttgagccactgtacccggcctctagtttatgtttctatgaatcagactcagtacctcatataaacggaatcatacagtatttgccttttttgtgactggcttatttcacttggcataatggcctcaagattcatccatgttgtagcatggatgaatatacagttaggagttccttttcttttttaagtcttaatctccagtttatttctgtttatttatttattttattatactttaagttctgggatacatgtgcagaacgtgcaggcttgttacataggtatacacgtgccatggtggtttgttgcacctgtcagcctgtcatctacgttaggtatttctcctaatgctatccctcccctagccccctacccgccgacaggccccggtgtgtgatgttcccctctctgtgtccgtgtgttctcattgttcagctcccacttacgagtgagaacatgcggtgtttggttttctgttcctgtgttagtttgctgagaatgatggtttccagcttcatccatgtctctgcaaaggacatgaggagtttcttacttttaaggttgagtaatattccacattatgtgtatgccacattttctttatccattcacctatctgcagatgtttgagttgctttcactttttgggaattgtgaataatgctgcagtgaatgtgggtgtgcaggtaccttttcaagattctgcttttgagttttttttggatacgtacctttttatgatgctttaaatacatatatgctatttttaaaggattctcagttttctgacatatgataggacttaggaagtaatctcaaagcatcatgttgacaggttgttagttgatggtgactgcagctagttggaaagtcagaagaatctagaacttgtccatttatactaaagaatttcatagtaagtgcagtattatgagtgtaatgttcaattggtagaagaggctatctgaggggatttagtgcatttcagttatctgttggtgtgaaacgaatcaccttgaaacttagttgctcaaaaattttaatggtggctgggcatggtggctcacatctggaactccagcactttgggaggccgaggcaggcagattgcttgaacccaggagtttgagagcagcctgggcaacgtggtgaaaccttgtctctacagaaaataccgtggcaggcgcctttagcaccagctacttgggaggctaaggttgtaggatctcttgatcccaggaggcagaggttgcagtgagctgggatcgtgccactatactccagcctggataacagagccagaccctgtctcaaaaaaaaattttaatggctccatttattatttcacatgattatgtgagttgactagggaattcttacacatcacaccatgtcagctgggacagctgaaatgtccacatggctggcagttggtactagctgctagctggcagttgagttcaaatagtcagccaggggtctcagttattttccatgaggttctctccatgaggccagctgggctcttcacagtgtgatagctgggactaagaaggagtgttccagaagaagggcttgtcctcttgagccagtgcttatcaggcctctatgtatatcatgtgtgctaatgttccatcaaagctagtcacagggccaagccaactctgtacagtgtagggactggctgcaggagggcatgaattaccaggaggtgtagttctctagttcatagggagggccatcaagatagtagtctaccatacttgtgtaaaagaaggcattaattaactattattattattattattattattttagagacagggtcttgctctgttgcccaggctggagcagtagagtggggcaatcatagctcattgcagcctccaactcctgggcttaagcaatcctcccatctcagcctcccaagtagctgggaatacgggagtgtactgccatgcccacctgaaaaagaaggcatattttaaaagcagacctttagtgtagagggttcttgaatttgttatttaaaatattctggtagtttttaaacttaggaaagacccactgattcttttagtgatatgtttacattgttgttatttggcataaattgtgttaatgcacagtaagatttcatgaagtcattaaaattcagccacttggactctaaacccaataaagatgtaaaacagcagtgctatgagatgcatattcagtttcaaaatataggaaacacagaaattactctgtgcacttttaatttgaaaatacttttaaaatgtgtagtataatgtagtgtctgtcccaaaagagtaacattcattatagtgtttctttacgttgttgaaaattttaaattcacttaacattagatttttattaaagcaaaaatatgttttccttattagcttacccttttgtaactcagattaaacccttgattgttcaaattaacctgaaaaaaattattcttttggaggccaaacttttgattaagtagttgtttgtctctaattttttcaaatttatgtgtataaatataacctgtcatcaaatcaatgctaacattctatacatgtttttcatgatatgaaaactataaaacatgaagttatttgaatttgtgtagtttttatcattttatttttactttccagtgcatctatcctttgggctctaaatcacttaataacctaatttctcctgatttggaagaatgtcacactccacataagcctcagaaaaggaagagcttagaaagcagctataaggattcacttcttttagcaaattccaaaaagactagaaattatattgctattgacggtggaaaagttttgaacagcaaacataatggagaagtatatgacgaaacctcgtcaaacttacctgatagtagtggtcaacagaatccaattaggacagctgattccttggagcggaatgagattttggaagctgatactgttgacatggctactacaaaagatcctgctacagttgatgtctctggaactggcagaccttcccctcaaaatgaaggatgtacatctaaactggaaatgccactggagagcaaatgtacatcatttccccaggctttatgtgtccagtggaaaaatgcttatgctctctgttggttagactgtatcctgtcagctttggtgcactcggaagagttaaagaacaccgtgactggactgtgctcgaaggaggaatctatattctggcggttgcttacaaaatataatcaagcaaatacacttctatataccagtcaattgagtggtgttaaaggttggtactaatattttatttttatttacttatttattcatctggagtcagggtctcattctgtcacccaggctggagtgcagtggcatgatcatgtctccttgcagccttgacttccctggctcaggtgggcctcccacctcagtctcccaagtagctggaactacagtcgtgcaccaccatagccagctaagatagtgagatggtggccccactgtcttgcccaggctggactcgatttcctgggtgcaagcacccttcccgcctcagcctcccaaagtgctgggattacaggcatgagtcaccattccagcctacttgtctttaattcttaaaaatattaatgttgagttttgtctcccagcatgtgggaaagatgtcatccattgcttctgtttcctggaggcctgggagcaaggagcccaggaacagtatcacgaagcttgagataataccagttacattatcctgactgcccaaaaggcagtttttttgttttttttttttatactttaagttctggggggcatgtgcagaacgtgcagttttgttacataggtatacgtgtgccatggtggtttgttgcacccatcaacccgtcacctatattaggtatttctcctaatgctgtccttccccaacccctccattccccatcaggccccagtgtgtgatgttcccctccctgtgtccatgtgttctcattgttcaactgtcacttatgagtgagaatatatggtgtttggttttttgttcttgtgttagtttgctgagaatgatggtttccagctttatccatgtccctgcaaaggacatgaactcatccttttttatggctgcatagtattctatggtgtatatgtgccacattttctttatccagtctatcattgatgggcatttgggttggttccaagtctttgctattgtgaattttttttttttttttttttttttaagacagagcctcactctgttgcccaggctggagtgcgatggcatgatctcagctcactgcaacctccgcctctcaggttcaagcaattcttctgcctcagcctcccaagtagctgggactacaggcgcccaccaccaggcccagctaatttttgtatttttagtagagacagggtttcaccatgttggtcaggctggtcttgaactccagacctcatgatctgcctgccttggcctcccaaagtgctgaaattacaggtgtgagccaccatacctggcctaggcagtctttttcaaaactctaagactgtgcttgtgtctcagggtgtcaggataatagtggttagttttaagtgtttaaactactgaaaagcagaatgaagaagtgagtaaaaatcacccataatcacacaacctcctaagatctcttggcacaataagggatatgtttttcattttattctctgtaaaataggatacttatgaacccacctcccaacacaggaagaattaaaacattcccaataacttacatttacctatgcgtttcctcccatcccattctctacctccccccataagtaatcattatctgaaatgtgtttcatcattccatcttttcttagtttttcttacatgtgtttatctaaacagtatacagtagtctccccttattgtagttgtacttttcttggtttcatttaacccgaggtctgaaagtagatgagtatagtacagtaatatattttgagagagagggagaccacattcacataactttcattacagcatattgttataattgttgtattttattattagttttaatcttactatgcctaattataaaacttgatcataggtatgtagttataggaaaaagcataatatataaaatgtttagttactatccaaggttttaggcatccactggggtcttggaaggtatccctctcagataatgggggatggatggtactgaaccctgtatatacaatgtttttccctatacatacataattatgatcaagtttaattaagagtaaattaaatgtgggccaggtgcagtggctcacatctgtaatcccagcactttaggaagctgaagcgggcagatctcatgaggtcaagagttcgagaccagcctggccaacatggtgaaaccccatctctactaaaaaatacaaaaattggctggctatggtggcacacgcctgtagtcacagctactctgggaggttgaggcaggagaattgcttgaacccaggaggtggaagttgaacaatcacttgaacctgggatcacgccactgcactccaacctgcctgggtgatagaatgagactctgtctcaaaaaaaaaaaaaaaaaaaaaaaagtaaagtaaatgtggctcaacatgttgctgtcagttggaacatttgtttctgatcgtgtcttccacccacaaattgaatgctttttccatcttaacacttatcaggcactgtggccataacttgagcagttgagatgcaacagcaaaattagcacaaatttctttttctttcttcgcagtttcatggataagagatttgttcttagatctcagcaacctcagcatatgatttttttctttaagttgagaactttgacctttttacttagagaagcattttacagcttctctttggcatatctgaattgccagcattactatgctcgtgctttggggccattattaagtcaaataagggttgcttgaacacaagcactgcaataccatggcaatagatcgcatcaccaagatggctgctaagtgaaccacaggcaggagtgtagacagcatggacacattagacgaagggaagattcacgttgccagtggaacacagcaggacagcaagagagttcatgatgctactcagaatggcatgaaatttaaagcttataaattgtttctggaattttccgcttaatattttcagaccacggttgagttcaggtaactgaaaccataggaagcaaaacacggatgaagagggaccacttcgtattgcctaatttagtttgttttgatcttctgggacctttttttcttgttgtaaaaatttatggggctgtttatagttgtggctcattgatttttcattgctacataatacttccattttgtaaatataacagaatattcatctacctgtcagtggacagtggggtttttttgccattataaatgctgctgctgtgaccatttggggggcaagtctcctggggcacagtatgagtttcccttctgtataacaaaggaatggaaaattatagactttcgtgtccaaatttacaagataatgacaattgttttccaaagtggttgtaccaagcaattctcccattaatagtgtatataagaggtcttcctgatccatatattcttcttggtttattttcacacttttgagatttttgctatttgagtggtataaaatggtctgtgatcttgatttgccgtttccacattttgaagaggttgtcggctctatgtgtatatattgctcatatttgttccctcttctgtgaaatgccttttgtatcttatccctatttgttctgttctgttgattgtcacgttttaattgatttgtatgagtttgttccttgtatcattgttgctagagttacatcagatgtgttgctgaatctgctcccagtttgcagcttgtgtttttactttttaaaaactgtcttgatttatagggaagtctttatcttttcatttggagctagtaatgtttgtggctttttaaagaaattattactattcccaaggtcagaaaatcattcacctatattttaactgaaaagttataaagttttgcttttgacattgaaatttctcattcagttggaattcatattgatgtgtggtatgaggtaaggatccatttttttcccatttgcatagccagtttttgtagctccactttattttctcacttgatctgccatgccacctctagcatgtatcaacatatcatgtatgtgtgcagctgttccttaactctcaattttattctcttggttactttgtctaacccagcactcatactttttaaattattatggctaccttgtagggcaagaatcctcacttttattcaacttcttttgaagtgtcttgatgcatattttttctgatcttacttggccatatatattttggggacagatgtgacatcataccaagctttctttgcttgacattgtagatattttcttattcattaatgtgctaaaaattttgagtttggtcatacagtcttttatatggatcttatacatcgtttccctcttgttaaccattcaggctgttactagtttttgctgttgtgaattaacaccaggacaaatatccatatatcttttgaattaattactgactagtttcctaggaaagatattagaatatgaatattaaaggtcttgctgaatacagttttcagaatggttgtaccaatatataattccattttcattatgtagaaaaaatacctcagtgttttctaaccacctttggttagaacattcaagacgttatggttttgttaggtaagaaatattttgtttcagtgtaggttttctttgagactgaacttttttgtgtgtgtcagtcatttacagttttttgcaatttttaaaattcagtttctcacaagcattttgcctttgacttttcttctatttctgctttctctaattacagaaaccccagtgttaagtaggtgacagttcagttgtttgctgcagaagagcagcagttcaatattggaattaactttaattttatgtttttaatctgttactaattttttacagaataattgtagtttttataatctggttaattatatgtttgagctgcattactttgcaatgtaagtttttttttttggcatggtcaaataacaaaaattctggttaatgcttatttcatattacaggagaatccagatatttcattagggaaacatataagcagagtgtgatcaggctgtatgaattatttataagagatgtgagtgaaaagatctatttgtagcttaagagtaagtagagtcagatgcatgtagagtcttttattcaaaataattttcttattaatcttggatagtttcttgtcacagtaattccattttgaagataataaatattaccataaagaagtgatcaaaaacatagatatgtgtgcccaaaggtatttatcacaatagtatttataatagtgaaaaaagaaacaactaaaatgtctggcaataggagaatgattaataaagcgatgtttcagctgaatatagtggcatgcgcctgtaagcccagctactcaggaggttgaggctgcaagatggcttgagcccaggagttaatgaccagcccaggcaacatagcaagaccctgtctccaaacacacaaacacacacacaagtgctatgtttcagtcactgtataataactagccagattttttgttgttgttgttttgtttttgtttttgttttttgagagagcatctcacttgcccaggctggagtgcagtagtacaatcacagctcactgcagcttgtagaaccctaaccctcctgggctcaaatgatcctcccacctcagcctcctgagtagctgggactacgggtgggtaccaccatacccagctttttttctaagagataggggtttcactatgttgcccaggctggtcagtttttaatgaagcacatttgtgtagacaaagcaggatgtggaaccggataaacactatgttgccactgaagaccccttcaaacccctcaaaaatgacatagaagggaaatatgagatattagtttgggaaataattgtaactttattaagactccttataaatttatctgttcctatgacctggctaagttcaataaaagttacacagagtggaataaatggttagacatcatttgtagtataagtaattgcacataaggaggtaactttagctgttttagagatagacatagtatctgaaaggttagttattttactagacctgtgattatttgggtgagaaaggctttcactgagattttacccattcagtaagtactaatgatattgtgctgatagcatatattaagggaatatatggtataccacagagaaagaattaaggaaattttgtgttttgctttttgtctgtttgcaaaacttactgactcagctttcattcttgggaatgtgtcagttttctgtgggaagatatacattgatgaggaattgataatgttctctgtattttcttagatggagattgtaaaaaacttacctcagaaatatttgcagagatagagacctgtctgaatgaagttagagatgaaatttttattagccttcagccccagcttagatgcacattaggtaagtaattggtaaaacttacttgtattatactcatctaccatatagaaatatgtacctcataaggaaatataatactgtttgattaccttggatgatcatattcttgggagagagaatctgagtagtttgacttaggaatctaccactgggtaagttattgtagggcagagctgttccatataaatatgtaggctggtgttccacctcttgagagtgggtgcagttctcagaaccaggagaattttagggggcatatcattagttgcttctctagtacgtttcctagtagacagatctagcatttttaacctcaattgtgcattaaaaagcaccgagggaatttaaaagtaaatgccaatgctggggcatttgaattaggatctcagggatggggctcaggaaatcagtaatttttagaaaccccacatgattgttatatgtacccagggtttagaatctcatctaaaccaaccatagtaattctacttccctaccagtgattggtttaggaatgtccttgtggtagagttttggccagtggatattaagagaaatatgctgatggccttttgggaaagcttcctcgcctttagaaagggcacaaggatgggacctctttgttctctgtgacttggtttttggcctgtgggagtggcgtgcagcaagtgagctagagagtctgtccaaacctttctaaatttttttagtattgcgaaaaggagctgcggggtttttttgtttgtttttgttttgaaagggctttttgttttatttttcttgtatccttgtattaactcttctattaatgttatagtagcagaatatgatactccctattagtaataacccatattatgtaaaatatcagtgccttctagtttttctctcaatgagtgacatttaacttatattaaaaaatgatatttatattttataataaaatcagttgttgctactgatttgtctagcatgtacaaaagacaccatgcttccagatcattataaaatatgatattttataatatatttacaatatatttataacatatttatatacttagaatatattttataaggctgggcttggtggctcatgcttgtaatcccagcactttgggaggccaaggcaggcgtatcacaaggtcaagagattgagaccatcctggccaacatggtgaaaccctgtctctactaaaaatacaaaaattagccgggcgtggtagtgtgtgcctgtagttccagctactcgggaggctgaggcaggagaatcgcttgaacctgggagacagaggttgcagtgagctgagatcacgccattgcattccagcctggggacagagcgagactccgtctcaaaaaatgtatatatatatatatatatgtgtgtgtatgtgtgtgtatgtgcgtgtgtatatatatatatcgggaagcatggcatcttttgtacatgctggacagcttttgacgtacttctttgactcatgcttctgccccctaattttcactttttttcctacattttattaaaattaatatataatagttgtatatctgctttatttttcatggacttatacatacatatttattctgttcttataaaagtctgatttttcgtatgccaaatttctgacatttcctcctctaggcctgaagaactgttgtaatttatgcatcagataggccctcagatggaatgaatattcttttttctttatatcaaggtgtaatttacatatagtaagaccgtttttaagtgtgtacagctctgtaaccctcactacaatcaagatataggactctgtcactctaaaacttctcaccaggttcatcacccccagccactgatctgttgagcgaatactcatttcaaaggagctttttccgtaagatccctagagtttagatggaagggctttcgtggtgcatttagcagataccatttcccttctagactccctacttcagttcccagttgaattaaagaatggtttctcccccagcctgagtcactacccttcttatccctgataattatttttggaacaaagttacatcttttgctccacctccgccatgggcctggttttctatgtaacagaaggaatttttaaattattgttttgtgtaatcataataattgggcaagcatacagctcttttcagtgcaggaggattcctctcttgttttactgcccattcaaggataggtgctatattttagctgaagatcttactaatgaaatgctctgtaatcatataacttatttaaagatgtgttttgagctctttcataatattttaattcatggagaactttatgtattttagacctgaagattttatattgtcattatgaaatgtaaattgtttgctttttcagttaatatatagttacaatagaatacggatttaaaggctgataatgaattacaaaattgtgctatatgacatactgtttatgcatacagtgttgcatattttcatttctaggatattgatttgtatttctacttacaaaaaaactttttaaaacttattttatggctgggcccggtggctcacacctgtaatcccagcactttgggaggccgaggcgggtggatcacctgaggtcaggagttcaagatcagcctggccaacatggtgaaaccctgtctctactaaaaatacaaaaaattagccggacgtggtgtaggtgcctgtaatcccagctactcgggaggctgaggcaggaaaattgcttgaaaccaggaggcagtggttgcagcgagcagagattgcgccattgcactccaacctgagcaacaagtgcgaaactccttctcaaaaagaaacaaaaaaactttttttaatgtttttgttcaaaagtagcagtgagactatcccgcaaaggtgactactaaaatagcctttgtaactactgatatttatagaatatgcttagggttagggtataactcgcttgtattatactcatctaccatgtagaaatatgtacatcataaggaaatataatactgtttgattaccttggatgatcatattcttgggagagagaatctgagtagtttgacttaggaatctaccactgggtaagttattgtagggcagagctgttccatataaatatgtaggctggtgttccacctcttgagagtgggtgcagttctcagaaccgggagaatatttaggggacatattgttagttgcttctctagtacttttcccagtagacagatctagcatttttaacctcaattgtgcattaaaaagcaccgagggaatttaaaagtaaataccaatcatagggacatttgaattaggatctcagggaaggggctcaggaaatcagtaatttttagaaaccccacatgattgttattgcttaggtaataacacctactgtctaccttgtggtcctgccaaggtgactgttcctggccatgttccaggcaactgtagttccaggctagggggagaactggaccatggaagtgaggctctgtccagggtaggggaagggatggaaggtgactgttcctggccatgttccaggcaactgtagttccaggctagggggagaactggaccatggaagtgaggctctgtgcagggtaggggaagggatggaaggactcagtctcttgggccaaatcggtaaggcagcatctaagctcctctgagaataggaaggagagcaaccaattggaaaaagaatgggaaacatgtagattctcctgcttaccttactttccagtctcaaagctggaagccagcattcactgttcagttattttcaatgacaacaagattcaaatcttcagttgtaaagttgttaaaggaaaggattagactgaaaagttaagaagaacggtagatgaagagtccaaagagttgaggctggtcatttaaccattgtgtggccacgccctctccacaggtggaacaagatgatcagaatagaaatggccaattctgatgtgtttctacagtgtttcactgattacattttttaacatctgtagcaaaccatttccataatttttttttttttttttagagacgaggtctcgctctgtcacccaggctggtatgcagcggcatgatcatagctcactgcagcctcaaattcctgggctcaaatgagcctcctgccttagcctcctaagtagcttggactacaggtgtgtagcaccactctcagctaatttatttcattttattttttgtagagataatgcctcgctatattggccaggatggtctcaaacgttcatagaaactggttttaggttcctagaggctggcagcaattctcagaggtaacgcaagcagtcttcctgccttggcctcccagtgtgctgggattacaaggtgtgagccaccacacctcatcaatttttgttttaatatactctaaggcttatcatagttccgagatctttttttttttcctgagaaatctagaaagatggaagacagtatgggtcttttgtggattttttgtcctaagaaattttcataaatgtctgccaaggaaaaggaaagagatcaaagtggtaattaaatctttaggatggacatttttagaaaaatgctttataaacttcccctctcccaactctgagtgacttattgtgtcatactgtattaacacatattcatgctgtaaatatagtaagaaaagacaatagttcacaattttggtttagtttttgccattattgattatgagcagtaattcttccttttctttttgaaggtgatatggaaagccctgtgtttgcatttcccctgctcttaaaactagaaacccacattgaaaagctcttcctatattctttttcttgggactttgaatgttcgcagtgtggacaccaatatcaaaacaggttagtttcttttgttttttaaaatgggttcttctagtttctccaccactaaggttaagagaacaatttgagcaccagacactacagtttgcttgcttctttaaactggaagggtcaaaacctcatcgtttgatagactgctagtaggatatttcctaaggagttcttcagtgggaaatagggacgatgagaggaataatacacctcccttctccagagtccttgctgagtagaatacctctcagaatgccatgaaactgtaggcatttttgtttattcctctattagaaatgaggggttttgcttgtttactttaggtttctaacattatagacactagttttaggctcttggaggctagcagcaattctcagaggtaatgcaagcttccccatttcttcccgtagtcctgtgaaagaccagccacctccagaagcctacacatgagtcttctcagccatactttctgcttttcctaatgcctctcagcagcgtattagaaaggccatgatcgatgtacctgttaccttcaggctttgcataaggtgtatatgaaacataatgaatttcgtgtttaggctcaggtcccatccccaggttacctctttatcttggagacacttctggtcccatacatttcagataagagatattcaacctgtacccaccacgtaaggagaggaataggttttagaagaggagtcagggaggcaaggtattcccagagggatattctcacttggtccatacctgagaaagttgctggctggcagttaggaagatgaccagactggctcaattgttcgtgtattcaaattattacaatagaaataactctttccacccccccccgccctttttttttttttgagttggagtctcgctcccgtcacacaggctggagtgcagcagcgtgatcccggctcactgcagcctccacctcctgggttaaagcgattctccttcctcagcttcctgagtagctgggattacaggtgtgtgccaccacgcccggctgatttttgtatttttagtagagacagggttttgccatgttggccaggctggtcttgaactcctgacctcaggtgatccagccacctgagcctcccacagtgctgggattacaggtgtgagccaccatgcctagccacacttttctttagcttaagtgcttaagttagaaaacttgaagtctctctaagttactcaagtaaaatgtgagataaaaatattacttttgaaggccgggcacagtggctcacatctgtaatcccagcactttggtaggccgaggcgggtggatcacgaggtcaggagtttgagaccagcctggccaacatggtgaaacgctgtctctactgaaaatacaaaaattagccgggcatgatggcggacacctgtagtcccagctactcgggaggctgaggcaggagaataacttgaaacccgaaggtggaggttgcagtgagctgagattgcaccactgcactccagcctggtcaacaagaatgacactccgtctcaaaaaaaattaaaaaaaattacttagatattcattatctaaatatgaaatcctttttaggtatttaaggagtagtcaaggagagttcagtctgggaggatgctccagggaatgcaggcaacaaaggttttgtttttttttttaactggttaactcagatctactagaacagggtaagggaggccacagagtagacaccatgagcaaagctaaccctcctgagttgaaaaaattatggacgagaagttatcattgaaattaactgttggcagacatatccaaagaatatcgcaaggatttggtccctttatgcatcctgagacagatgaatgtgtggaatggcagctggtgggcaacagagcgatattggcatggtggtgatacagggaaatagtttcatcgtgttaaaagccatggaacaaagatacataatggctgctctgcagaaaaatccacgtcccctctccaaagggcctgttttactctgatgtaaaaattgggtcagataaattttcatattaagctttttgttgagtaaacttttgtaatagtccccaaaactcccactagaacagggtgagaattaacgttttattcatacctaggacttaaataatttagtgtaagcaagtgagtatgagaacacatctgtttccagtcttctatcattgctttatataaattctctggttttctcctcacagtaactcagtgaggaagatcctagtgtcctcatttggcacgtatggatatgacagcttgaaaggggttagattgattcccaagatgacacactgtaagtggcagagtcaggagacacacttaggctcttctggcctctaagactttcttgctcactgtggtatactccttaatcactacctgggttttaaataatataaataaccttgctgattaaaatcagcttaattgtagcttctctggaatccatatcttagttgtttgacagttttcggttgagtgtcttctgtgtgttaggaactcaggcactggaaatagtgtatctttgccaaatttactaattaggtagagagataatacacgaacacataatagaggtccagtgacttcgtaattaatctgatctttgggctgcttaacgttagctttgaatgcaagatgttaaatgcgttttagagatatatagcacaaactgtgagagctcaagggagggaagccactagccgcttttgtttgcttttttgttttttaaaaataatcttactttgttctaaaaataaaagtagttatagagggaaagctaaaatgaagtgacgttttcttaaatatgttttaatatgtcataacttaaaacttatttccacttaatctgaaggagaactgtccagcaaattcctttgtttttgtgaagctgtttttagtgccagcataagggctttttactcaacttggaaagtgtaacccagagtcagttaaaaacatagtcttcagaggcagatctcaggtctgttatttatcactgtactctatgtgtcactttccccatctgtaaaatggggataagaatagcacctgcctctgagagttgtttggaagatgagtgtccagtgccatgccctttgcacatagtttaagtgttcagaaatgtcagatgtcatgtggagaattaacacttacttgctgagacagtctcctttttataaactaaacagtaggagcctttacataacaattatctttgaaaatttaagaatttagcagaaatcagtgcatttgttgatatctttatgttgctttgcttttaaaatgttaacctccctgactactgatgtttttaacagacagtgcttcctcacaagatttgtaagtatttgctattgtttagaaaggaagcttgtatctcttaagtagctgctctttaaattacaaatatttttattaaagtggatgcagttgaggtttagtgtacatctttaaaggtcatctttttagatggcgttgctctcaagtattcagactaaagtgcaaatttagaacttgtgtaacctgtgaaaacaaaatttgttcacaattaatgctgtgtgtgtgtgtgttttttttttaaggattaaaaaaagttaagttgtatgtattcctgattttatgtttggaaacatccccttttcatttttggttgtctgtaatggctagccagtttgagttatttgagtaaggggtgagctcttaataaatttgacaaccttagaacagtggttcttcactaagggctattttttcccccttgggacatttggcaacatctacagacaactggatgccgttactggcatctggtgaggagaggccagggatgatgcttaacatcctacagtgcacaggacagtgcttcacagcaaagactctctggtgaaaaatgcagtgataccattgaggaaccctgtctttttttcttgcttcatctcatagttgaaagatatgggaaattaacatggagcatcttcacagagcttctttactagaggtagggaggaacattgccatattaacatgatttggggaaataagaaagtatgaatcacgaaaaaggggaggaatacttttagacattggtttaaattaatgtaaatgcatttaacgttaatgaatttgttatgtcatttttttataggcatatgaagagtctggtcacctttacaaatgtcatccctgagtggcacccacttaatgctgcccattttggtccatgtaacaattgcaacagtaaatcacaaataagaaaaatggtattagaaaagtgagttaaaattgtcttataatttttagtacaaaatgaaggtggatttacatttttcttaatgtgtaggattgaaaatggtgacaacaacttacctttctgaaatttgagttaacatatatttctgggttgccagctgcctcgctctatctggccagtgagcccactgtcacggtgaagccactgaaaagccaacttaggctgactctctggccccactctcctagtgtctttccttctttttgccttttttctccctttaaggatatcaagcttcagtttttctctcctctgccaagtgtatggagtttctagaattctgggatttccttaatcagatttcaagaactaagatgattcaaagataagccacaggctcatctctctgaatttccatcttctcctagatctcagcatgctaattcctcatcatcttgaaagctatctagtggccttgagcagatatattttcattgtattttgccagcttttctgtttgtcctcagttggggaggttggtcagcattaccttttccagtattaccagagaaccatctgtttaaactcacaggtcagttccatctcaggccgtttccctctgtctcattaatgcactcacacatgtacacaacctctctactcttcattttcagtctaatcgtacattaaggaaatgttttgaggtctaatttgatgtaataaagaaccgggaacattaacctttatgcccttgaatgtgccagaaacccttcagaatctttcctaaaggtttattctcattgaagtaataaatcctcagtttatcagtgcttacaggctcaaaagggaaaaagggcagtagtcccctgttccctcctccaggtatctactttaaaccttcaaattaaggtagtatttacttttacttttcaaattgatgtgcctattctaccgtaatgcagtctgttctccttttatagtaattgagactagggttctcacaccaacacctgggccccatctctgtttagcctttccctgtcctttcaatgcaattgcgtatttggctaactcagtactcggtgtttgcattgttattaatatacatgtgttattccctcttcagccaagcagtatatatagttaggtttcacttttacaattcttatttttccgggaattgttatttgccttgttttcatttgttttattatgtactgtgagtttttgccaaatactttaaagacttattaataaattttcaatactcagatgcttcacagttttttactctgttcctctcccctttttttcctggaactctttcctgccacctttcactctttgctgcagtctgcgctggttcctctctgggcctgcagcatagggtgctctttattatgtacacacttccagtcactatcgtagtttttagcccaaggcctcatccccacattctatcacatctgttgcccataaatatccagtcctttaggggttctctgggaaaaataagctcttctttgtcatcaacatatgcactccgcagtactcatgtcttcactttgcccgttctgctgggtaaggtgccacttctctgtttgctttctgtcctctaaatatttgacttcttatttgcttattttcctttctttgtccttttggactcatatcttttttgcccctcactattatttgatagcatttgtgtaggagggcgaagtgggaaggaagaggaggtgtctgtatctgtctgaagattacagaagtctgtaatctgtcttggctgccaggtgtcagttttgagatgtaaatgttgatgatgaggtgaggagaagagcagcagagcatggggtctgccatcctgccttggaccatggcctgctttaggctgcttggtgtatatgatttcatctagctgttcatacctgctttttcccgtgccccagcactgaacatagactcgtaccattgttttgtgtaatctgttaattggttgcactgcagcatatatattttttaactatacaaataagttgcttcccttaaagattcatgctctgatctggaaatggattcattaggtaaaagtcttttaatggaaaatgtgttttgagttccagtgggccaatttatgagcagaatttataatgtgggcatttcctgttttcttcaaaagtaaattgaactagtgtatgaagtttcacttaaattttaaatgccaaggtctttatataagtcctttgtgtttttttaattttgaaatttgtataacttgatttgtttgtgtctaatggaatttagaaataaatttaatatagtttttagggctaacctaaaagtaattgggttcatcatggtgtcatatgtaattaaaacatatagaatcctaaaaactaattaagttccttggacaccttatctcacataacccacatctctaatgtctccccattgggaaaagagtccattgataaatcaggtgaattatgcctagcgggcccaaatctgctacttttctttaagttgtttaggagttacattcagaccatggtgacatggagcaccaagaacttagaatcagatttcattttacttgacaaactcttgaaaggtcactgccacagtctctcttgagtgcaaggctatggctatgctttgtagcacagggacgcgatatttctctgctatctttgggtagcagaggttaacacagctcccttgtgctttctttctctcttttctattttcttttcttttcctaaggatagatctttaaataggaggagtttaaccccatgttaggtgaattcaaatggatcttagcctgatgtctcttgttctcttttggttccagtttggttaattcctttcatccaattttccagtggttgagggagaacctaacttgctctcctcgactctgagcatcatccttcactgacagttcaggcattgtgggtaggaagaagtctgagaacaaaacctagggataaagtttagtagagatggggtttcaccatgttggccaggttggtctcgaactcccgacctcaggtaatccacctgccttggcctcccaaagtgaggctggaaataagacatgctggaattgtaagtaggacactagagtctaggggaatcaaagaggaaaatgaacagaaaagggaaggggaaggatattatttgattgactccaagatgctactgtttgtaagttttaccattttaaaaatatgccattaagaaagaaatgctggccgggcatggtggcttatgcctgtagtcccagcactttgggaggctgaagcggacagatcacctgagactaggaatttgagaccatcctggccaacgtggtgaaaccgcatctctactaaaaatacaaaaatcagctggatatggtggcacatgcctattgtcccagctactcaggaggctgagacattagtactgcttgaactggggaggcaaaggtttcagtgagcagagattgtgccactgcactccagcctgggcaacagagtgagactgtctcaaaaaaaaaaaaaaaagaaagaaatgctgcttatttaactgtgttctgtcaatgttaaggtgtatcccgacttcagagatgttaacaaatgggaaaaaatttggaattcattaggcatttggaacttacaaagtttcggccgggcatagtggctcatgcctgtaatcactttgggaggccaaggcgggtggattacctaaggtcaggagttcgagaccaatctggccaacatggtgaaaccccatctctactaaaaatacaaaaattagctgggtgtggtggcatgcgcctgtagtcccagctactcaggaggctaaggcaggagaatcgcttgaacccagggggcggaggttgcagagagctgagatcgtgccctgcactccaacttggacaacagagtgagacgccatctcaaaaacaaacaaaccaaaaaaaaaaaaaaaatttcatagttacagaaagtagtatggaggccataccgagattttcgacatggtagtaaaactctgcattatggctctgttctgcatcatctctgttctgcatcgtttcactccacatcagaccctggatagctttggtgtactggtcgatcttgtggcagtaaggctagtgtaattaagaggatattttaaaacttaacatataattgctctagttgttgtctcttttttgctggttaagaaaatcaaatttctatcctatctgaatctcatagcagactttggagatttctgacaagtcatttcttactacctaggggaatgtacttgtactcagctagagtctgagtatcttctacatccagggaattgggctgagtgtggattttggtcttggcagtttttacttttattaatttgcaaaagaatagaagacttggaatgtacaagaagcataaaaatgtgtcaggtggttttacatgcgttatttatcacgttaatatgtcttaagatattttccacgtgtaaacttatgtaaaggcaggaaactagtgagatttcatattctagggatcaagagattgttttagtaactagcctcagaaagtatcttgaaaggtattatataaggtcaaggaactaaatattagtaaagagtcaggccaggcgtggtggcttatgcctgtaatcccagcactttgggaggccaaggcaggcagatcacttgaagtcagcagttcgagaccagcctggccaacatggtgaaaccctgtctttactaaaaatagtagtgtgtggtatggtggcgcatgcctgtaatccagctcctcaggaggctgtggtgggagaatcacttgagcccaggaggcggagattgcagtaagctgagattgcaccactgcactccaacctgggtgacagagctagtgtctgtctcaaaaaaagaaaaaaaaaaaggtcagataggtgcctaaagcctgcgtgtctcgctatgagaatacatctcaagttttactgtggttcattgattcagacatgtagttcacattttaacctgtctgaaatggtaatatgtgaaattgatgtcatgatatagtttaattggcagcatgttttcatagtggtacattttataattagtgaaatcttagatttgatgaaatagatatgattttttaaagtgggaaagtttagtgttatagacagtttgcaggactttttattttgtaggtacttaaattttgaggacttaattattctctaataaagtgattgacaaggattaatgtataaattataccttgtcagtctgaacaatctgcagtttggacattgattcaaattcatttaggctgaataaattttgataaactaagtaagttttgacagctatttaaatattgggaaaggggatattcaacatttttcttacatcctgagagctttgttaaatttagttatttgagacccattgggttctattttctggttcagcatgttgctgtaatggtaaaatacaattttgaaattatagttgtcttgaagttaataataaattgaccaatatgttgtatttttttctctacttagttacaaattgaacttttcctaagtagaacttttaatttgacaggccccctttgcttcctgaggtaactgaaataggccaaattaatgcttttttgaatatcttaggtttgttgctttctttcacatgttacctaccccacttaacaaaagcaattaatctcagcacttgatgccaaagaaaattctaaaaggtctggattttttccttggattttacaaagtagctacaatgggacttttaagacaaagctgcattgctgcttacagagcaatttttgtttaatggtctgtgttagagtcatactgcatgatgacttccaactgtctgggataccattctgaaaagggtttagtgttacatacttcttagagagagttctccatttctaattaaggcacacatctggaggtgctcaagaaaaattagtgcagttagccttggaagtgttatgtgtgactagttcacttcagacatcttttgtataatcagacacatggcattaaatttatttaacttctcttgcttttctctcccacagagtatctcccatattcatgttgcactttgtagaaggcttaccacagaatgacttgcagcactatgcatttcattttgaaggctgtctttatcagataacttctgtaattcagtatcgagcaaataatcattttataacatggattttagatgctgatggtaagtgtttagaggttttcttttaagataattggcatagaaactaaattctagcatgtggggactttttggtttttgttttataaaaaaagacaaactttgtcctgactctttctctctccattctcgcctttgccttctgcccctcctcgcatctattaaaagtgatggttttagtatcctgtctcattttttcctttccttacatcatgtattataggtaaacacatgcgcatgtgtgtatttctcttttagacaaaggatgagattactactgttagctcagtttttttttccctacttaacatctttgcttttattttttagacatatttctaagactattaaacattagacttacgtagcccttctgtcattgtgaaatacatagtttactaacagctaccatcaagataaagcctttatttaaataattaaacttcttagtggaaagctaagtaagcacagtttatggattttgggaatttttgccttgcatttgtctgatatggtaaaatattgagtttgtttttctcataatgttcactttgtcttagacaagataactcaatccccttaaagggttgtatcaagccattgataagggctcactttgatataaccattttctgttatttagacactctttcacacttcctattttcctcctggggatggtttgaatggatgacacaataccatattataaaagcactttacaaactgtaacttatgttataaatgtaattattaccttaaggttttaccctgtttcagatttgagtggaagtagttctttacaatacaaaacaacttattttaactttttttgcatttcaaagaatgatcaatccacttcaggtgcagcatggtttccaaccctgacagcatggaagaatcatttatttagcttctaaaaatgtgcaggctgtaccctagaccagccttggggattaggcccaaatatcaatgttgggtgtttttggtattggtttttggcccgcctacccgcccttccttccttcgttcctctctctcattctctctctctctctctttctctctctccttctttgctccttcattccttctctctctctcttttttttttgagacagcatctcactatattgcccaggctgttctcaaactcctgggctcaagtgatcctcctgcctcagcttcctgagtagctaggactacaggcacatgctatggcaatactgttttaaacattgttttcaaggctccccaggtgattccagtgtgggtcatgtggtagagaaccactgacacaggcaaacaaaggatacataaagttgtctatttaatgggtaggtgcaggtagtagataagagtgtagccacataaaccacatgcttagtgaacggttttgttttgtgtgtatgtgagggattagcatctctgagtatattttgttttcccttttgaaacttatcagagaattcatatgtctgttatgtgactaatgctcacattaaaaaaagttatgtgactttttttaattcatatgtctttttaattcatttattcattcatatgtctgttatgtgactaatgctctcataaaaaaagtaatgctcagtttactttttttatatcagatcatatatatatgtttttttttttgagatggagttttgctcttgttgcccaggctggagtgtattggcgcagtcttgtctcaccaccacgtctgcctcccgggttcaagtgattctcctgcctcatcctcctgagtagccggaatacacgcaggcgctaccatgcccggctaattttgtatttttagtagagacagggtttctccatgttggtcaggttggtcttgaactcccaacctcaggtgacccacccgcctcggcctcccgaagtgctgggattacaggcatgagccaccgcacccggccatatcttatattttaataaatattttaatttggtctgtaaatttttctttttggggaatgtgttttaagtctgtgttgagtcctagacatttgttgttctcagatagtcactagtgataccttaacattaaccagcctgttggcaactaaattggcctgaagtgacaactaaggaaaggtctctttctcctttcttaatctttgcattccttaagattagttctttgtaggaaggctttgaagtctggtggcaagtaccctttatccctcacaatcttaagataaggtctttctgagcattaaaaagtgactgtgggagatatgtcaaatgagttttctgtgtgtgctctgagaaatctttttttcaaaaaaggatagatgtacttgtataaggaaaagagaaactgagcgcactttcaatatttaagtaagtgtctctaacatgttttgcaacataaaatgatgaccactgtgttggtcattacttctctactgctaaaacaatgttttctaaaataatatactccttagaaaaaaatatagtgctttgggtgtgcactgttgtaatccaaggaataggaaatgttttgtagtaagtgcgatggtgtttgacatcgtgatttattaatttatcacatttggtttcatagaaatagagtaagctacgtatttgctgtgccgcaattaccatgacattacacttgtatctatttctgtttcatagatgtgtagatattgatatatacagtggaagtatggattgttttgataagtttctaatgaaagtacagatatttgttgattatttattaagaaaggttgttactcatccaagcccgtggttagcttttcccaaattatcatgtggtagtaagtaaaatgtaaagaaatataccctcccttaaccccacaccacctgttagcacctagccaccttcctttacttctcagccgtactttttgtatttttttgttgtagtggtaaaatataaataacataaaatttaccattttaacatttgtaagtgtacaattcattggcattgaatacattgtgtgcaaccaccatcaccatcaggactttttcatcaacccaaacagaaactactcattaaacaataactccgcatccttccaccccaaagccctggtaaccactattctactttctgtctctgtgaatctgtctattctagatacctcatagaagtggaatcgtacattatttgtccttttgtgtctggcttattttactcagcatattttcaagattcatttgtgttgtgggatgtagcagaatgtcattcctttctaaggctgagtagcattgtatgtattatccatttatctgttacggacatttgactattgtgaataatgctgttgtgaacattggtggacaaggaactgaaagtccctgcttttcattctttttggcataaacctacaagaggaattgctgggtcttaacggtaattctgtgtttaatttttggacgaactgccagactgtttccacagcagttgtactattttacatccccaccagcgttacacaaggattccaatttctctacatccttgccaacatttgctattttctatttttttttaataatatccatcctaatgggtgtctttttttttttttaaaggaatggtttaaacaggttaccttcttactcctcattcatgctttagttgactacataaggacccctctccctattggcaccattgaaattgttcaggcaaaaataactgccagcgacacactgctttaagtaatggacttttcccaagttttgtattaatatttcagtatttggtagtgcatcctactgctagtttttaaactcttcccttgtcatctatcatctcattctctcttgacaaatgtgaaaatggaagctcagaaataaaacaagaattaaaacgaatagtgatccttcaggtaacaagcttcatttatcatgaaaacatatatgtatgaaacattctgttttctgatgttattggataaattaggtgataaccaaattctaagttccaaaaattaaatatactctatctaaggactttaacatggcagacaatggtgacaaggtcaagaacatgttttagagtcttctcctttggtcggtattcaatgatacaacagttgaaaaggccagaagaaagttaacctaggatggtggtttttgaatatctaactttcacttctttcccatcttccaggaagttggctggaatgtgatgacttaaaaggcccatgttctgaaaggcacaagaaatttgaagttcctgcttcagagatacatattgttatttgggaaagaaaaatatcccaagtgacagataaagaagctgcctgccttccacttaaaaagactaatgaccaacacgctctcagtaatgagaaaccagtatctttaacatcgtgttctgtgggtgatgctgcctcagctgaaacagcctcagtaactcaccctaaagatatatcagttgcccctcgtactctttcacaggacacagctgtaactcatggagatcatttactttcaggtccaaaaggtttggttgacaatattttacctctgacacttgaagaaactatccagaaaacagcctcagtttcacagttaaattctgaagctttcctgttagaaaataaacctgtagcagaaaatacaggaattctcaaaaccaatactttgctatcacaagaatcactaatggcttcttcagtatcagctccatgtaatgaaaagcttattcaagaccaatttgtggacataagttttccatcccaagttgtaaatacaaacatgcagtcagtacagctgaatacagaagatactgtaaatactaaatctgtgaataatactgatgctactggtcttatacagggagtgaagtcagtagaaattgagaaggacgctcagttaaaacaattccttacaccaaaaactgaacaattaaaaccagaacgtgtcacatctcaggtatctaatttgaagaaaaaagaaactacagcagattctcaaaccacaacatctaagtcattacagaatcagtctctgaaagaaaatcagaagaagccatttgtgggaagttgggttaaaggcttaataagcaggggtgcttcttttatgccactctgtgtttcagctcataatagaaacactataactgatttacaaccttcagttaaaggggtaaataattttggtggctttaaaactaaaggtataaaccagaaggccagccacgtatccaagaaagctcgtaagagtgcaagtaagcctcctcccatcagtaagccaccagcaggccctccatcgtctaatggcacagctgcccacccacatgctcatgctgcttcagaagttttggaaaagtctggaagcacctcatgtggagctcaactcaaccacagttcttatgggaatggtatttcttcagcaaaccatgaagacttggtggaaggtcagattcataaacttcgtctaaaacttcgtaaaaagctaaaggcagaaaagaagaaattagctgctcttatgtcttccccgcaaagcagaacagttcgaagtgaaaatctagaacaggtgccccaggatgggtctccaaatgattgtgaatcaatagaggacttgttaaatgagctaccatatccaattgatattgccagtgagtctgcatgcaccactgttcctggtgtttccctgtacagtagtcaaactcatgaagaaattttagcggaattattgtctcctacacctgtttcaacagagctgtcagaaaatggggaaggtgactttaggtatttgggaatgggagatagtcatatcccaccaccagtaccaagtgaattcaatgatgtttcccagaacacacatctgagacaggaccataattattgtagccccaccaagaaaaatccatgtgaagttcagccagactctctgacaaataatgcctgcgttagaacattaaacttggagagtccgatgaagactgatattttcgatgagtttttttcctcctcagcattaaatgctttagcaaatgacacattagacctacctcatttcgatgaatatctgtttgagaattattgaattaatgcttgttaacttttttcatataatatttattattattagaagaacttacaatgtgttcaggtagtgtttatacactggacttgtgtaattacttgtgtaataaccatgaacaaaatgcaaggtttaacctttggttctgcccatgaagcatgtaatctttcttacacattaaaatcactgaatgtgttctcctttttggtttcattttgttcttgtgagagtatgaggatttcaaaatgttaaagatgaaaagtggcgtctagtttctgacagtttgtacagttggatgcattacatttttagatttgaagttttggttatgttagtgttatgagtgatctttgtggtggttttcttcccctggaaacctgttgctcgtggcgctttgcccacggtgcccgagttcttgtcctgtgtccagatatgcagacaaatgaagggtgaagaagaagaagaggagctttatttagtgttagaacagctcagaaggagacccacagtgagcagctcccctgtgtcggcgggcaggtcgtccctcaagtgttcagctctcagcagagaaaaggccctggagagggtgactcctctcagctctcagcagagaagcagccctggagaaggtagcttctgttcgcaggcagattgtccagaggtcctgctgctctcagacggggccctggagaggatagcttctatccataggcaggttgttctgccgtctctacaggtctctgaagctcttagcagagagggtagctcctccctgttgctggtcgtcccaccctctgctcagttctggctgagcctggggcattttacgggcctcgggggaggaagtgcatacttactggcctggaaaaggcaccagttcccactcctacaggtgggactggcagcctggccctcagccttcaggccctccctgttcatggcttccaggcttacccccctgctttgatctgagagctggtgccaatagcagggagaagccaagctgcagaggcaagcacttccgagcctgcaaaagcaggcccccaaaagtgcagggatgcctgagtctgcacccgcacccaggagggtggagatcttgcctgctccaaggctgcagccggaatgatagcaggctgactggagcacctgccaccatcattagttcaagagtttatgcagatttaagttgtatacggtatatgaatgtgtgacagttttccttatggttgtgtggccttctgtaagagcctacgcctgtttgttacaccggtagagtgctgtggaatgtaaactttccctatgtcacttatctcctttatctctccatacagaggagggcaagaaaccttgttacttgaactttagtaatgttaagtgatcaataaatctataaataaatgatagcagaaaaaagttacctgtttttgtgatgatgtacaaactttacatgttatcacaaataccatctttcttcccaagacatttacttctgtaaccaaagtgggacaccatctaacagttctgttttgggagagagtaataaccagtgcttgtgaggcttgttagatgttggttgtgatatatgagatagatgttatttcatttagacctcaacattcctgtgcgtgagatacttttatcacatcttacagataaggagactgtactcattcagttgtggagctgagattgagtagagtggctattacagcagttgagtgctgagcttatcaatatatgttccactcctcaggcttcatttaaagtaggatgcccaaacagcaccactgccgtagagatttgagttaacagcagtacttactgaggtttaaggctggcagccagtgtccttgcagtaaaattatttgctagggactcagtacttcataatctatttgtcagatttactcctaagcttctgtgttgttttattttttttctgacaaaagtagtgcatattgtcaaggaaaaactaggaaaataccaaaaaaaaagatttttgaccatgcattttaatacttagtgactacaaacattttcctattttatgcatatagattttaaataaacgtgagatcctattgtatctgttttaatggataaacattgtttcactgttttaagattctgaggtgatttatactgtcttgccattgttaattgcagcagttagccttgttgataaatttttgcatggatccaagttttgttttccaggagtggagttgcttggtcaaaggaaatgcacatttaaggttttttggtgattgcatgactgacttccctgggccctcgccaacactaggtagtagtattgggaggaaggggggaaccaatcctgggtgctccaagattactagtgagcctgaacattttctataactattgtccacttgagttgttgttttgttttttttttggtggaggcgggggtgggtttaagaattgcttatcctttgcttgtactaattatcttttcaacaaatatttctagattactgctaaggaccaagcactgttatcagcctgagataaggcagcacactagaaggaaatccttgctccttttgagtttgccttccaaacatggagatcaatatataatgttaggtagtaataggagatacatgcagttgattcatgtcatttgtagtagttatggtcaataaagttgccttgaacactgaattagtataaactgaaatactgttcctaggggaaataggttcctgctagcctgtggtcatgagatttttgtcaaacaatcactatataaccttttctgtttctgtttaaagacatgttatttgatctatatggttgattctttacattaacatggccaacagcactgtaactcagcctgaacgaagcttatctgacacatggtgttctccataaggcacatcatagctttctgtgcttaggaacactagacggcacttcagcactgcacttgaggacgttttaaacagtgaaatcaacaaaaagcacaaaaaaatgcaacaataggctgggcaaggtggctcacgcctgtaatcccatcacttagggaggccgaggcgggcggatcacgaggtcaggagatcaagaccatcctggctaacacggtgaaaccccgtctctactaaaaatacaaagaattagccgggcgaggtggcaggcgcctgtagtcccagctactcgggaggctgaggcaagagaatggtgtgaacctgggaggcggagcttgaagtgagccgagattgcgccactgcactccagcctgggcgacagagcgagactgcgtctcaaaaaaaaaaaaaaaaggaacaataacaaagacactagtcccccaaaaatacacttgtttacagtgtgaactgaaagaggaaggtggagtattgacttgtttgacctcagctggaaatgtgcacgtcctgtgactcaaatttttctctgttctgtgcatgcatgtccacgaataaccacaagaagcactgaaagcattgatttttagggttacaaattaattttagcaagtaaatgaattcacaaatacggaatctgtgagtaatgaggactgattctttttttttttggagatggagtttcactcttgtagcctaggctggagtgcaatggcatgatctcggctcactgcaacctccgcctcccgggttcagcctccacctcccgggttcaagcgattctcctgcctcagcctcccgaatagctgggattacaggcttgcaccaccatgcccggctaatttttgtatttttagtacagacggggtttcaccatgttggccaggctagcctcgaactcctgacctcaggcaatccacccacctcagcctctcaaagtgctgggattacaggcgtgagccaccgcgcccggccgaggactgattcttatgtcagatggcactaaatgctatggagaagaggagtggatgagagggagaagtattttagaccaggtagacttggaaggtttcttggaggtgggtgatgtttgagaagaggcttcaataaagttagggagctcgccatgtgattgcaggaagagcgttccaggagaacaaaagtcatgaagagtgagtgctaggcatgtgtctggtctgtttgggctgctataacaaaataccttagactgggtaaaatgtataaataatagaagtgtattgcttatagttctagaagctgggaagtccaagatcaaggtatcagcacattctggtgaaagctgctctgcttcatggctggttctctcactgtcctcacatggcataagaggggcacagagccctcaaccgtctctccagtggccccatctcttagtactgttggattggggatttagacttcactaattttggggggacacaaacattgagaccacagcagcatgactgaggataagcaagaggccagtgtggttgagcagagtgatcagtgaaggagagttaggacatgagtaaagaggctagcagacaccagatctcatatggctttgtaggccatagtgaggactttgtttaagctgagaataatagataacctcaggaaagtttcaggcaagagggtaacatgatctgatctgggttttaaaaggatcactgaagtggggagactgtctacagatggtctgaataggagtcctagtctattacaatctccttggagtttagggtggtaactggaggtgttcaagagtagttggattactgttggatttcaaaagtagagccaacacgatatgtgcattggctgtgaggtagaagaggagtcaaaatgaactccaggttttattgactgagcaattgtgccatttcctgagatgggtcagatttgggaaggaaagaatttaaaggggataagataatcccattaggagtgtgttaagtgtgagattcctattagactttcgagtggagatgatttaataggaagatagatctgcaacactggagctcagcggagagggacaccctggagatagccgtttgggaattaggaatgtgtggatcatgttataggatggggtcatttagggacttaaaacagctctgaagaacaaaaatggtgccttgatcttggacttcctggtttatagaactgtgagcaatatatatatatttttttcaagacagagtcttgctccgtcatccaggctggagtgcagtcgcaccatctcggctcactgcaacctccacttcctggttcaagcaattctggtgcctaagcctcccaagtggttgggactataggtgtatgacaccatgcccgactaatttttgtatttttttgtagagacagggttttgccatgttggccaggctggtctcaaactcctgacctcaagtgatctgcctgccttggcctcccaaagtgcttggattataggcgtgagccaccatgcccagactaaatttctaacatttataaattatccagtctaagatattttgtgatagcagcccaagcagaccaaggcaaaggccaagcacacttgctcctcctgacttttgctcttcctggaatgttcttcctttagtcacatggttgcctgcctagcttcattcaataggagtgtggtgccctgaaaatacaaggaagaatgcttttcttttttttaaaaggaagggatgattatctgtcagatgctgctgaaaaagagtaatagagtaattggccactggctctggcaatagggaagttagctctgctaactccacatgaacagtttcacatgaacaagtgtgagtgggctcaagagaagggatggtgagaaagtggagctatggactcactcttgaaacattttctggtgcctcgtagggcaatgtgaggtcaaggtttttgttactgttctgaagatgggagaggctgacacatggatgttgtaggtgagagaaggggcgcttgcgggggcaaacttctccagggatgggattccagtgtctaagaggaggcggtgtgaccctaagagctagaaaaattattttattaataggaaagacaaagtacttaggctcagatgctaagagatttgctgataaaagaatgagaacggtctcttctgattattttcttggggaaataaatagatcatcagctgagggtgtgaggggagaaggagttgaacatggaggaagacaggtgtgaaatattggtctcagaatggagagcgaattgaatagggacatgcagtgggcttgctaagctgtgcggagagcccgtgggaagtttatggtcatcaatttaatggcgaccagccaagatggtggtttatttttctccagttgtatttaactgctcaggtgcaggacagagagactaagtgtgaagttaatttcagccaacgtagaggaattgtcaggcagatgggacaaggagatagaggagaaaaggaataaggcttcctgcaagggtaatgattgtagggatggataagtaaggaacacaggaagtggctgtctgctgagtggtggcagagctcagtgggtcagagcaaggttcaaagaatggcagagaggcacttgtggaggaagtaagctggctagaaagtagtgtgcttgaaattaagcttctggagatagcaaggttacaggtgatgacaaagtctgagtatgacaaggaaactgcagggccagagttggcaagaattcatgaaaaatgaggagaaagaggcaccaagaggctgggatagcacatggattgtctctgtgtgaggcaaagtcatctaaatggcagcagtggccctagcagaaagaaatatacagtgagccggagcaaaaatcctcaaggacaggcagaacgccatgaaaacggcagatgacagccaaaggagcaggggcaggggctcagtccaaagtgtttcagagtcactggagggttgagtgggaaggggagggagtggctgaaatggcaacaaggaagaacctctctcatctccaggcccaaaagtatgtggaatgcgggagataagacagccaccactggccagggctgtaaagggacattcagcgaatattcaggttccatttagcacgacagcagggaagggactgttggcagaaaaaaactggggcagtgggattaaagacagaccacacattccaaaaggcaccgtgggagggtcagggggcgaggttaggtctaggcttcagtgtcctgggagactcagtcttcacagggtgacagcgatcaagagtgcagcttaggctgggtgcagtggctcatgcctgtagtcccagcactttgggaggccgagacgggaggattgcttgaagccaggagtttgagaccagtctgaccaacatggcaaaaccccatctctactaaaaatacaaaaatcaactgggcatggtggcgtgtgcctgtagtcccagctacttgagaggctgaggcaagagaatcacttgaacctgggaagcagaggttgcagtgagctgagatcgtgccactgcactccaacctgggcaacagagtgagaccctgtctcaaaaacaacaacaacaaaaaagaaaagagtacaacttatgaaggggtctcctggggagagggtttttgggattctcctgcctctcaaagtgctgggattatgggcgtgagccaccacacccagccgagggaggctgagttctaattgttgtatctctcttgggattggcctcctgggcagtttaaaagacaaggcaaggaatcttttggagaaagagactgggggcaaggtgtgtctgaacaagaagtgtgagaagctctgtgggctcccttcagacttccagtcgttgaattgggatctcatttatatcagctctaggtgtaacgatattaaatcttctctgtcatttggcaattttggtttatgcttgatcatcatttttaatgtttcgacatgtagaagtttaacattattttacattcttttccttctggcatcatgttttagcaagattgtttccaccaaaagaatatatatatcttctaatgaaactacgtttcttttttttttttcctttgctttctcttttggtatatgaatctttgattatttgtaatgtattttgatgtgtaacactgaagtttctattttgtactatttttttccccaaacagtaaacttattgttcaaatacttattgaacaaccttcactattctttaaccatttagaatacgccattcacatatctttcatactacatttaataacattttttaattaaaaaatattctactgatttgtttattttgagaccaggttatgaaactggctaatttttgtatttttgttaaataccgaaattcactgtgttgccaaggctggtctcgaactcctgggctcaagcaatctgcccaccttggcgtctcaaagtgctgggattacaggtgtgagccgctacacccggccacacccggccaacacatattatttgttattacatttaattcccacagtacattgaaattatcagggaaaagttttcagtgaaacattattgaacgccacattaaaagtgtaaattacaaagatttaatgccaatttttcagaagaaaaaagaccaggaggaaggtctatgaagttttagccagtctctcatccacctaccatttcacgatcatgcactgtgtaagtcaggaaaagagtaagaaaagtgaaagatacaattgattagagagttttgctggatactatagatgaaaagaacacaaaatggaacagcctcttcaagcttagagtcaacggctgtagtcccaaagactgtagtcagaggcggtagggccaaaagacatgacttatggcattggaggaagaggatgctttgggagttcatggtagaagaggcggaaaaaatctggtggattaaagaaagcatcccaaagtgacattaaactaatgactaaattctgagctgttttcaggggcaaagcctgtttgggcacccctgccacacttaaagagtcacctaggtatggttcgtgggctctgaacaggcctgctcagtgaacatatttgtgactgtttctccggcccttttagctgtattgagtaaaatttaaagagaccattgttttggcctaagctcctgccctaggcccaaagaacagaccaaacctgaatggcttcacttgtcctaggtgctgtgtactcaaactgaactttgaaacaggtcggtttttcaaaaaaagcaaaagattcacagcaaccaattagaagaggcccggtcaacctgagccagcatgatgaggctcttctgctttaatcctacaaggaaagaaactttgaaatgaccaatctgctttcattcttggtttctgctttctttggtctatttctgcctgtaaaacctatctcctctgctcagctcattgaagtacccttctatttatagatgggatgctgcccgactcatgtatcgctagtaaaagccaattaaattattacactcgatttgttggaattttgctattttgacagcttttcaaaaacaccagtaggttcacatccctaattccccagccagtgttccctcaaggaaccatggaagaagcaaaggtggctgaaaggcgcctcaggatgcttctaagcacggcacatccatgaaaaggcacttactaatatttgcaggatagcaaagcactgcagtgacgataaatctagtattggagaagttcaaaataatcagtagattaacacagaagccagagcttatagggagaaaaggaaccctatgaaatacttcaaatccgaaaacgaacatgcatttcctgtttagttagtgcaggtacgtaaaagcttggtaaagtacccttcttgccagctttctctttcttacaagccttttcactgggctgggaggctgatattatctaaatatgctgaggaggttcaagtatctccacaactcacctcagagtgaatgctcccctcggccttaaggcaatataaaccagccctgtttagcaggatagcaaaatgtttgcggttgtaaactggtgtcccattggctgtggcgcttgtggtgtaaagaatccctgtgcttggtaattaatagagaaattctatattttaaacttcagttgtatattggctcttatccatggcagattttcacgtatgtgttatttttttatttattcagagccggagtctcgctttgtcgcccaggctggagtgcagtggcgcgatcttggctcattgcagcc

SEQ ID NO: 625 - DNA, 3816 bp, Homo sapiens
acagggcggacagccacgcctctgcggagggcgaccggaagtgctcacgtcttcaccttccccgccacgccaccgtcctttcaggcccagcgtgcagcaggaaggaggactcttttgccgcggactcaagccggaagccgccttcctagtggagacgcgagtgggggaggagcagtccgaggggaacgtgggttgaacgttgcaactagggtggagatcaagctggaacaggagttccgatcgacccggtaccaagaaggggagtgcccgcggcagggttcattgaaaaaatccttagtgatattgacatgtctcaagtgacataaattagccaatgactcggaatgatggattctccgaagattggaaatggtttgccagtgattggaccagggactgatatagggatatcttcactccacatggtggggtatttgggaaaaaattttgattcagctaaagttccatcagatgagtattgccctgcttgtagagagaagggaaagttaaaagccttaaagacttaccgaattagttttcaagaatctatctttttgtgtgaggatctgcagtgcatctatcctttgggctctaaatcacttaataacctaatttctcctgatttggaagaatgtcacactccacataagcctcagaaaaggaagagcttagaaagcagctataaggattcacttcttttagcaaattccaaaaagactagaaattatattgctattgacggtggaaaagttttgaacagcaaacataatggagaagtatatgacgaaacctcgtcaaacttacctgatagtagtggtcaacagaatccaattaggacagctgattccttggagcggaatgagattttggaagctgatactgttgacatggctactacaaaagatcctgctacagttgatgtctctggaactggcagaccttcccctcaaaatgaaggatgtacatctaaactggaaatgccactggagagcaaatgtacatcatttccccaggctttatgtgtccagtggaaaaatgcttatgctctctgttggttagactgtatcctgtcagctttggtgcactcggaagagttaaagaacaccgtgactggactgtgctcgaaggaggaatctatattctggcggttgcttacaaaatataatcaagcaaatacacttctatataccagtcaattgagtggtgttaaagatggagattgtaaaaaacttacctcagaaatatttgcagagatagagacctgtctgaatgaagttagagatgaaatttttattagccttcagccccagcttagatgcacattaggtgatatggaaagccctgtgtttgcatttcccctgctcttaaaactagaaacccacattgaaaagctcttcctatattctttttcttgggactttgaatgttcgcagtgtggacaccaatatcaaaacaggcatatgaagagtctggtcacctttacaaatgtcatccctgagtggcacccacttaatgctgcccattttggtccatgtaacaattgcaacagtaaatcacaaataagaaaaatggtattagaaaaagtatctcccatattcatgttgcactttgtagaaggcttaccacagaatgacttgcagcactatgcatttcattttgaaggctgtctttatcagataacttctgtaattcagtatcgagcaaataatcattttataacatggattttagatgctgatggaagttggctggaatgtgatgacttaaaaggcccatgttctgaaaggcacaagaaatttgaagttcctgcttcagagatacatattgttatttgggaaagaaaaatatcccaagtgacagataaagaagctgcctgccttccacttaaaaagactaatgaccaacacgctctcagtaatgagaaaccagtatctttaacatcgtgttctgtgggtgatgctgcctcagctgaaacagcctcagtaactcaccctaaagatatatcagttgcccctcgtactctttcacaggacacagctgtaactcatggagatcatttactttcaggtccaaaaggtttggttgacaatattttacctctgacacttgaagaaactatccagaaaacagcctcagtttcacagttaaattctgaagctttcctgttagaaaataaacctgtagcagaaaatacaggaattctcaaaaccaatactttgctatcacaagaatcactaatggcttcttcagtatcagctccatgtaatgaaaagcttattcaagaccaatttgtggacataagttttccatcccaagttgtaaatacaaacatgcagtcagtacagctgaatacagaagatactgtaaatactaaatctgtgaataatactgatgctactggtcttatacagggagtgaagtcagtagaaattgagaaggacgctcagttaaaacaattccttacaccaaaaactgaacaattaaaaccagaacgtgtcacatctcaggtatctaatttgaagaaaaaagaaactacagcagattctcaaaccacaacatctaagtcattacagaatcagtctctgaaagaaaatcagaagaagccatttgtgggaagttgggttaaaggcttaataagcaggggtgcttcttttatgccactctgtgtttcagctcataatagaaacactataactgatttacaaccttcagttaaaggggtaaataattttggtggctttaaaactaaaggtataaaccagaaggccagccacgtatccaagaaagctcgtaagagtgcaagtaagcctcctcccatcagtaagccaccagcaggccctccatcgtctaatggcacagctgcccacccacatgctcatgctgcttcagaagttttggaaaagtctggaagcacctcatgtggagctcaactcaaccacagttcttatgggaatggtatttcttcagcaaaccatgaagacttggtggaaggtcagattcataaacttcgtctaaaacttcgtaaaaagctaaaggcagaaaagaagaaattagctgctcttatgtcttccccgcaaagcagaacagttcgaagtgaaaatctagaacaggtgccccaggatgggtctccaaatgattgtgaatcaatagaggacttgttaaatgagctaccatatccaattgatattgccagtgagtctgcatgcaccactgttcctggtgtttccctgtacagtagtcaaactcatgaagaaattttagcggaattattgtctcctacacctgtttcaacagagctgtcagaaaatggggaaggtgactttaggtatttgggaatgggagatagtcatatcccaccaccagtaccaagtgaattcaatgatgtttcccagaacacacatctgagacaggaccataattattgtagccccaccaagaaaaatccatgtgaagttcagccagactctctgacaaataatgcctgcgttagaacattaaacttggagagtccgatgaagactgatattttcgatgagtttttttcctcctcagcattaaatgctttagcaaatgacacattagacctacctcatttcgatgaatatctgtttgagaattattgaattaatgcttgttaacttttttcatataatatttattattattagaagaacttacaatgtgttcaggtagtgtttatacactggacttgtgtaattacttgtgtaataaccatgaacaaaatgcaaggtttaacctttggttctgcccatgaagcatgtaatctttcttacacattaaaatcactgaatgtgt

SEQ ID NO: 626 - protein, 1080 aa, Homo sapiens
MMDSPKIGNGLPVIGPGTDIGISSLHMVGYLGKNFDSAKVPSDEYCPACREKGKLKALKYISFQESIFLCEDLQCIYPLGSKSLNNLISPDLEECHTPHKPQKRKSLESSYKDSLLLANSKKTRNYIAIDGGKVLNSKHNGEVYDETSSNLPDSSGQQNPIRTADSLERNEIADTVDMATTKDPATVDVSGTGRPSPQNEGCTSKLEMPLESKCTSFPQALCVQWKNAYALCWLDCILSALVHSEELKNTVTGLCSKEESIFWRLLTKYNQANTLLYTSQLSGVKDGDCKKLTSEIFAEIETCLNEVRDEIFISLQPQLRCTLGDMESPVFAFPLLLKLETHIEKLFKFSWDFECSQCGHQYQNRHMKSLVTFTNVIPEWHPLNAAHFGPCNNCNSKSQIRKMVLEKVSPIFMLHFVEGLPQNDLQHYAFHFEGCLYQITSVIQYRANNHFITWILDADGSWLECDDLKGPCSHKKFEVPASEIHIVIWERKISQVTDKEAACLPLKKTNDQHALSNEKPVSLTSCSVGDAASAETASVTHPKDISVAPRTLSQDTAVTHGDHLLSGPKGLVDNILPLTLEETIQKTASVSQLNSEAFLLENKPVAENTGILKTNTLLSQESLMASSVSAPCNEKLIQDQFVDISFPSQVVNTNMQSVQLNTEDTVNTKSVNNTDATGLIQGVKSVEIEKDAQLKQFLTPKTEQLKPERVTSQVSNLKKKETTADSQTTTSKSLQNQSLKENQKKPFVGSWVKGLISRGASFMPLCVSAHNRNTITDLQPSVKGVNNFGGFKTKGINQKASHVSKKARKSASKPPPISKPPAGPPSSNGTAAHPHAHAASEVLEKSGSTSCGAQLNHSSYGNGISSANHEDLVEGQIHKLRLKLRKKLKAEKKKLAALMSSPQSRTVRSENLEQVPQDGSPNDCESIEDLLNELPYPIDIASESACTTVPGVSKSQTHEEILAELLSPTPVSTELSENGEGDFRYLGMGDSHIPPPVPSEFNDVSQNTHLRQDHNYCSPTKKNPCEVQPDSLTNNACVRTLNLESPMKTDIFDEFFSSSALNANDTLDLPHFDEYLFENY

SEQ ID NO: 627 - DNA, 48853 bp, Mus musculus
  misc_feature (1)...(48853): n = A,T,C or G
ccaataaaagagaagtgatccagaggcaacactgtggagtcttcggggtgggtagttattggtatctaatgacatttgagttacttcagttacattgagaaactactaacttatgacctaagaaaacatgatctagagtattgaagatatgcttaatctttctgccaccagtggtgaggatcttttctcaatacgtgtgctcctgtctctgttccagtattaacgctccaaactgaaattagtgctggcatttcgacatggcagttatctccttacgtaacttcattagtgatggacctacctgtttatgctgaaagccatattcaaacaaagactcacgttttctttctactacacgtcacttaaaaatgtatcactctgagatccatacagctggataataaaaccaactgtgcattcctccttaaaattccctctagactggttccagaaagtctaatagtgacagcacactaacctagagttgtttccttgagcatctgaaagagctaagagagagctaaagatggctatattgttacctctgctctcccgcatacatgactagctgctctgagtccccaccttgacttccttgcaatgatgaactgtaacctgaaatggtagccaaaataaaccatttctctttttttaaaaaaaaaaaaagaaagaaagaaaagaagaatagaagaattattatcacagctcctacagagtaaaagcacagcaagtaactattacaaaggaccgcatggcagtatacttgatatttaagagtaagtgtcttagtggagggcctcagaagtagccaggccatttcttccacaactgctcattgtataatagtgagtttgaggccaggcaagaggaaaggggagggctacagtgtgttcactactgtggacaagaaacttctggtcccaagtggggtgaggttaacctatctgaaaacaaactgggctagctaactgagttcaaattcccctgagtttatcttgggtctgaatctatttctcaatgtcaggtacacaagaaatgacagctgtagtggcagacttaattctggggattgcccaatggcagtgttgtaaaaatccccaaatccttccctctaactcttcctttactctcctcacccctgcccacaaggtcccaagcattgctttagctttgggctaaccagggtttgagccctggttctatctggtcacctcctttctgggactcagtgtcctcagctctgctttaaggttgtcatgaactcacaccttcaaagctgtcatgattgtcatgatggtcacagaacacgatgcacattagggctcagctcaaggctagatctaaatttctatcagtcgttagcatcatccctaaaggattcttcacaaaaaaaaaaaaaaaattccagtgaagactatgcacctatttgaccttgaactttagaagctccaggggggggcagaaatggagtctgtttcttctctagttcacacacagaatttggcaaagaacgtggtagtgatagatagatttaaaactgtgtggtccatgtccactgagtgtacatgattgctgaagtaggagggaacaattagttatgactcgtccttcacccttaaataatgcaacacatgtctgtaatgtccaccttctgcaggtcttgtgttgggcccggcaatcttacctgctgtacttcctttgggcaggtgatcacctccaggctctcagcacttctgcagatgaatacccctccctgcaagatcacagatttctggagtcaggattcatggcagatcagtagaacacttatttattttgtagtgctaggaatgattctcagggcatgctaaacacgatgtctatcgccaggcccacttgagcaatgtaacagtgcaagcccacactccactgtggtctctcatcagtgcagttcgggaggatgttcacacagggtgaactgcaagccaccatcagcaattcctgaggacttgttagaaaatacaaattatgggctctcaattcagagctacacaatctgaaactgtaggagtgggcccaggcatctgacggagtgtgtggaatgtgtgtgtgtgtgtgtgtgtgtgtgtgtgtgtgtgtgtaggctagaagttgtcatcttgagttgctctccacctttttgttgttgttacttggcaactcaatgatgtggttaggtggtctagagctcatgatttgactaagctggctggacacagctccaggggtcctcctgcctctgccttcacagcgctggggattataagcatgtaccaccattgctggctttttatgtgggcgctgggtctctgtgctagcctggtaagtactttatcatctgaggcatctcccagcctaatttaaggatgtctgtaatgtaccctaaaggttgggattcagggtacagtgcagcagtaattctgggcacactgagactgactcaatttgcccttcctccaggaaatatccgttgcccaaggccacccctccctcccttttactagcatttctaacttcctctgtctgcttacgtcatctgcatgcagaggtgcttctctaggttgcaagcagggtgaattttacccatctctgtgtgacgctgggtggcccagaacttacaagaggaggctctgcttgggaaagaagtccgaggctgttgtggagttctgtttcctcctaaggctgctgttgttgcgtctgctccttccaggtccccctcacagtgttctcctctgtgagtagtggtcctctcctactgtgtaatggtcctcctactgagtggttgtcctctcctgggctgagggtagcatttctgccatttctggtcttctccggttatactggcttctctggacattttccccatttctactcctgtcacgtttgagtaaaacctttttgaacacattgctgcatctgcaggcaggaagccctgtcctgctctggtccttctttggatggtagtcaagaactgcgccccagaccctgtgctaggcactgtgtttataacttcactcctttattacagctccaggagcaggggccactgtacttacttccagtgactggagcctaggaaaactaaggcatgaacagcaacaagaatgaacccatggcaagatcagggcctttgttgttgtttgggacctcggtgaaggtctgggtgtgtgtagattagaaatgctttgattaggcaatactcagaactaacataaataagctgatggccctgtcctgagaacctacctggtactatgggtctaagaggagcctagtgcattaaaactagtgtattctgtcttgtgtaacccacaggcctcaccatctgccttcagcatatctctggtgcagcacctactgtctttaccataggggtttttacttgagaggccgaagcaggaatatcagcatgggcttgagagcagcctgagctacactgtgagaccctatctctaagaaaccagaaacaagtctgtggctaacgcctgtgatcccagaacgtgggagagtgaggcaggattattactgggcgtcaagggcagtctgagttcagatacgcaataataaaagaagagctaggtctcaacagaagcatgcttctcaaggctctaagctctgggagagcgctgaaccagggggtctcaggaaaggtgggccagctagaagggcagatgaaaactggatgcgttgtgaattctcagtaaagcgtgtaagccttctacccccatccccgtgggggaaaggccttgggtgagttgagtaagaatgttgcagacaggatgatgcaagggggctctctgtacttattgcaacagaacactccaaaaggggcctggggctactctgacagccggctcccaaagggatcagctctgatgtccatcaaacttgctagacaagagcagcagcacaggccacttctgggccccctaagggatggcctcgctgcaggtgtgctcttggctccaggttgaaacccagagtgtccttgacacagcctttctccttcctctggcctctacttgtcactgagtcttgaagatctgaagccttggcatctctcaaaacacccttcttgggcctgcatccccttcattttgtccctactgtgtcaccatccttcactccttttgactctcctgtgtcacagcaggctctccatgggggaagacaaacgtataggcactggctgctacaggcctatgaaggacagaagctagggatccaactggacacagagaggggacagagtcttcctagggccatgtgctgcatgcctccattcgctcatagcctgagtctccacctttgtctattctgcactcttgggtgttcagcatcactccatggatggcaagaagtcctgccattagccttgggggaagaagggaagggcagagaataaccctgccaggttaccatgggttgtctttgcccccagctcctattgggcagtcgtttcccctcaccacccctctgtagagccttctccctttggctcttctgtccatgggccttaaatgtcaatagatttggagaaagtctcccatattcatgcccacatctttgaaaacagtctttgttattaactttcctcaaattacccaatttgtgagagccgttccatgtagggaatctaatttaaggcagaggtgatcaggaacagtgccaggaaggtggcgggtaaaggtgttcttgttcatgattcttcagaacataaaaatgagcatgccttgcttctgctaaaaatccttcaggcctccccatcgctctggagacaaagtccatattctataggctgggagttaagattgcaccctctctggcccccagtgactaagtgtcatgtagggatgtctggaaggacagcgaagggcttagaaacgggaggaagcctgagagggtgcagccctgccacatagcagctccagctggcaaattcctgcctagagaagatgatgagttctgagccagtgagccatgccaggctgcctttctcttgcccaaacctctgccctccttctctttgcaagtgaggtgagcccgtcctgagttgaacctcaaaggccctagctatgagcgtgactggtttaaatcctacccaacccctgctagccatcagctccctgatttactcaatcttttcaatgacaagacaggataatctcatggggctgtggggggtgcttaaaggggggatgatggtgggaatccccttccacccaagagtgctgagttcaaggtggatcctcttgcagccagcggggatgggacagcaaggcaggcaggcgggttgcaggctagagaggttgggatgtaaattcagctttcccacaggtcaactgaaatacccaggaccagaagtaaaactggaagcacttcagtctgtacacacatccatagaaacccaaggctatgtacacagttgctaatagcaaactgccaggcagtggtggcacatacctttaatcccagtactcggggagaggcagttggatctctgtgtgtttgagtccagcctggtctacatagcacgcagaacagccagagttgttacacaaagaaagcctgtcttggaaaacaaaaaccaaaacctcatagcagcctggcactggtgattgtatggagtatccagactgcccacttagtaacgcttaccctggtcgagcccttcctggatgtgtgccttgaaccatatctggttgtgttcctgagctgggatgtgtagcaatgaaggagaggtgacacaggtctagaacacaccttatagctgacctgtttgtccttttgaagagcagacaagctatcacaaaattctaagggtgctttagatgtgtggagagaaaactggaagttaataccaactacgagccccagcacccactgttctacagaggcgaaatcccaagtcagtgttctctcctctttatttttatgtgtgtggctgttttgcctgaatgtatgtctgtgcaccatatacatgcttgaatgaagccagaagagtggatctgatcccctgggactggagttctgctcagttgtaagttgttatatagatattgggaatttaacccagctcatccgtttttttttaaagatttattttattatatgtgagtacactgtagctgccttcagacactccagaagagagagtcagatctcattatggatggttgtaagactccatgtggtttctgggatttgaactcagaaccttcggaagagcagtcagtgctcctaaccgctgagccatctctccagccccccccccaacccccacccagctaatagttttgaaaggtcagctgagccatctctccagcctcacaatgccttctcttaaagttctaactgtgcatctggttttccatctagatccagtctgaaacaatggacagaagcagtgaccacagccctagaagccaagtgataagggagctcttggactccctctgaagcccttagtacatggtcccacattgaagggtctaaactagggactagctttgttttttcaagacagggtttctttgtgtagctctggttgtcctggaattctctgtagatcagcctagcttcagactcagagatccacctgcttctgcctccttagagttggagttaaaagtgtgctgacccacaaggttccctagatttggctcctgttgtcaactttcaactccacctcctccctcccacctcccccctaacttaccatctacatcccctttccagccataccagggctccattggaacccatgctggaacctctgaatatatgcccttcctctctgaccaacagattaatctcatatccagcagcaatattgcctcattttgactttctcatttatcgttccctgacaaatgacacgtctattggccaatctaccgtccactgagcctcttggttgagttagacccacaatgggcatagaccaagggctcctgggcttgggtaaattccaagctcagcagaggcaggcaatggcaaccaggatgggagggccagccttggcctgaccttacacttccctgcacaacagcctggccatcctttgaccactggtctcatctcttggttgagtctccaccaaggcagggacaagttctggttctgtgtgttccaatcagaacctgacccagagaaggtgcacaggaaaatgctgaagtatacacatgaacttgggatctgaatgtttccaatgggccttgtttacccaaagtcctgccatttgttatcattaagataatggtatcttactctccttgcataatggtaacaccctttccatattactttagttgatccataagtagtcaagataggaactgtcaccctttctttctgtctcccttttttcctccctcctcctgtttcttttttgagacagggtctcggctaactcaggccagcttccaaatcattacatagtcgagaatgaccttgagctcctgaaggagacatcctcctccacctcctcttcctcttcctcactgaccacatgctcaggttataacaggaaggctaacttcccacctccactttgtgatgaacaactatcgacttagcaaggacacttgacaagtcactgctaaaggaaagactacaccccaggcttataaccttccagattaatctctgcccatcggacagtagcagagtaagtgagtttttcatgggtcctggcacaaggcctcctccacagagatgctcctggagcaggaatgtgccatacagtgacccgaggtcttccatgctgtgtgtgtgtgtgtatgtttgtgtattgttctgccccccatatatatatatatatacctctctccccccacatacatccatctcgagtctcccgtgagcatggcatgccagtagctttcccttagttccataaaatgacccaggactaccacagagcatcatcatgccctaggatctttttccttctatttatggttgactcagttctctgggtttggtagtattttctcagtgagatttgtgccccaccactcatcatgcaagcgtttctaggtttcactaatggcatttgtcacaggccctgggactgcaaatatctttctcccctcttcaggtagaactcacctcctttcttttctgctcttccccaaggccctattgacctagaccttacagtatgcaacccaaaggtgagccacaccccagtcctatcttttttctgaagggcatacctttaaccactgcctttgcttgagattctcccactcacccagctccccaccgcaacctgtcctcacgtttatttctcatactctgtcaagagggatcctacaattcatcttacctctttcgtttcttttaaggctctcccagaacccagtcccaccccaaagtcttaagagagacactggaggattttctaatcccatgtcactgcagtctccatctcccacgttgccaggactacagtctctatggtcctgccccaatccagacatgctgactgatgctgcccttcggcttgtgctcacaccctcattctgcggaactcctcttcctctgtgggcaatgggaatgagtcccagtgcctgtagtgagcttagtccatatacctcagttcctcaattctcaaagcctctcacaagacaatcacgggtgttcccgtttttacagatgtgaaagaaaactgaagctgcaaactgcgagtggtggcacatgcctttcactcagcactagagtcagacaaaggtgcatctctataaattcaggccagcctagtctacatagtgccaggacagccagagctacaaggagaaacccaatttctaaaaagagaaaagaaaagaaaaaccaaaacatcaacattcacacaaccctcaaccccacaccctgcccccctcagcaaaccaagccaaaccaaaaacaccctgaagttgaggaaaagagaggaagagaggtctggaactgggcttgaagtccatcactcactatgcttgtagtattgcctttgtctttggtgtttggagacagggtcactatgtagcctgggctggcttcaaactcttgcatacatacaggagagggagggagggagagagagagaagaggagagagagagagagagagagagagagagagagagagagagagagagagggagagggagagggagagaaagagagaagagagaggaggggagagaagggggagaggnnnnnnnnnnnnnnnnnnnnnnnnnnnnnnnnnnnnnnnnnnnnnnnnnnnnnnnnnnnnnnnnnnnnnnnnnnnnnnnnnnnnnnnnnnnnnnnnnnnnnnnnnnnnnnnnnnnnnnnnnnnnnnnnnnnnnnnnnnnnnagagagagagagagagagagagagagaaaaaaaggagaaaagggggagagggggagagagagagagagagcgagctgctaggattgtaggattacaggtagtagactccatcgctctaggttccttcctgataagactcaatcactcctatttttttgctggtaaaaggaaaggctgcggcacttgggtaactgtcaggtccagctgtaacctaacgaattccaacactactcactgcaggctaggcctgcccaaggaaagcacagccaaaagggacacaggcacccgcacggtccggatcgtcccgcacgtgctcaaactccctgcccacgttccagctgctggaccgtactaacgtctgagagagaggcttgggagaaggacaaggcggtcgctggggcaaccaggagtagtttcatacaccgggactccggctcccttgcccgtattctatagactctgaaccgtacagttcaggccatgctgccttcctgggctctgtgcatagtttatcgccgggagtctcaccccctacaagaacatggcacagtccggggcggacccttttgccccgccctatagcgtcacgacccgccccgttgtgaggttataaagtgcgcgcgcagcggcgctcggcgccgtggccgcgcttcgctggctttctgctcatctagggtggcagcggctacctacctcagctctcgccctgctgccgccacggcctgggcgctgtccctcagctcccggagctcagcgcgaagccctggccccggcggccggggcatgggtcaggggcgcggcgtgaggcggctttctgcacggccgtgacgtgcattggcttcagcatgaagaccctcatcgccgcctactccggggtcctgcggggtgagcgtcgggcggaagctgcccgcagcgaaaacaagaataaaggatctgccctgtcacgcgaggggtctgggcgatggggtgagtgtcagtcatccctagggctttcatcctgagggcacccacagcaagacgactttcaggaagggactttggccaaagcgtgctgccctgtgctggacggacggctagctagttcaggtcggagtcccagacaattatttccagtttttaaaaggtctcgccttgtagcctaggctggcttccaactcttaatcctccttccttggcatcccaggtgctgtgattgcaggtgtgccactacaactagcttctctttaggggaacttgactcttctgcatcctgtcatttggttaaggatgaggcaagattcatgcttagctcggctggttacccagtttgagccaggcaacctggtatcctaggctagcctggcttcattctccatcctggtactcataatgttgcaacacgtgttacatcactcgccatccccccagctgctgagggcgacaccacccactcagctcagttagtagtgatatttcactctccagcccccagtactgatctacctcacaaggtggagcaggatttggctgggaggaactggatggggcagggtggtaagtagggttttgtaatcccctgaaacagtcactggatggagaacatgcctgcctggaaccaggtgtgccccaactgccctctgccccagcttttgtgggccaacccagactgtgaagccctcacagcgcaaccctgagtctgacatacttagaagaggggtgggaaacccttggatttttttcgtttgtttagtctgtgtaacagctctgtttgtcctggtattctatagaccaggctggccttgaactcacagagatctgcctaagttgattatccttctagaagttgtgtctgccttcgagatagaaccgaggccttcagtgaatgggaaaggggggcatacagttcaaatcacacctcagccttttccatacaaggcaaagcaccccacgttgcttagctgaagctgcagaaactgaaggaggaggaacgagctaccccagttttccttagaaagggcagcggtgatgcacaccttcaatcctaggacttgggaggcagaagcaggcagatctcttgagagtgagtccagcctggcttacaggatgagttagttccaggacatattagttgtggtaatcttgaaagtttaggcaatcaggaacaaaataagattgctggtaaaccaactatctagtggttacatctcttagtacatgttgtataaagtcaagaatatgagatagagatacacgcacgcgcacacagttctaaattcagtcttctcttaatggtacggcatgaatatttcttaccatttgtatgtctgccattctcacatgctggtggctgcaagctaacccatgctggggctccatcagagtgtttccacctggcattggcaccagtcctagctgactgttgctgtggttatctgcccctggagaagtgtttccatcctagggggcaagcccctggagctgccccacatacagcctacagcttccactggcctcttctcagtgcttctctcttccttgggccttttgattcccttaacagggaaggacgcgatctgcccatgtcaatgcttttaaatattctcagtctctgggtaatggcccctgcctgcggtctgctatggcccctcctggagctattcttcctgggctctcctctgtcttccaagagcaggatgcctgttaaattcttttttttttttttttgacagttttgtttttgttttttaactcagaatttgtcctccagctcttgagcagttctttactgtcatagcaagagaatttctccatgttgatgttcaatgtagaaaatacaatggggaaaaaagtgggtgtgattacctcatagactgcaaccaggactaatatgaaatgcagactagtcagtttaactctctggaatctactttggtgaaagactaggtggggtaggggagggtgctctagcaaagtctctgttatcttgccatctccaggaggcctccttgttcctccttggtcctatggacactccctagtggcctagtttgtctcctcagagcagttcccaccaaccaccctggtagtggcagtgttcaaggaaggaggcaagagtatggactctgtgaagggaagttccataatgggtgagagattgcactgataacttgttttattgtcgaaacctggatggtgtgcatttgttgggagagagggagtctgttttttatttgtgtgtgtgtgtgtgtgtgtgtgtgtgtgtgtgtgtgtgtgtgtgtgtagttcctcaagacaggttgttttgtttgttttttatggctggctgtcctgtcacttactctgtagaccaggttggccttacagaactacctacctgcctcctgagtgctgggattaaaggcatatgccacccctcctggttcacattggcatttctgatctctgaatgtctggcttagacggtggcttagaagctaataggcacccgcagggccatccctgcctttgctcctggatggggggcttctcatggtggagccttggctgcttgtgactattcttagtttagtccacgacccagcgtgaggtagtggcagtacagctctgagctgggacattgtgtggctctgaagcctaggacaggggtggagtcatagttgggattttaataaaagaatcccaacagctgtttatgatgaccgcatagcttggatggtagagatggagaacccctcccctgcgcatatgctaggtggagggtaaaactaagtggctagattgttgcgggtaattctggaactgggggttggcagtcatctgacatagtcccgtagtcctgtgatcgcagagtgagaaccttgctcttgtccccgctccctcagttccctgtggcttttcccacttttgagtcgcatctgctgccaaggctcacctcggccaggaaaggagggccaaatgcagtgcattattagcagggaagtgactcagttgcaagtgtggaaattctgctctgcctctaccttcctgctcctaaattcagccgccagtacttgagttatcaaactacagtcatccatggtgctgggtctggcccaaccttcatagtacacattagaaactgaggtctcagctgggcggtggtggcgcacgcctttaatcccagcacttggaaggcaggtgacaggtggatttctcagttctaggccagcctggtctacagagtgagttccaggacagccagggctatacagagaaaccctgtctcaaaaaaaaaaaaaaaaaaaaaaaaccaaaaagaaaaaaaaaaaagaaagaaagaaaggtccccacgaaggactggtccaggagaagaaaagacaaaagccagaacagaacccccgattcatctccatctgcccatcagcctccttaagccagagagaggcatggggacaggactgagagctgaccataatatgcaccatgctgttgccaaatgcctgctgcttactccatgttgggtatggtgtctccttcccaagcttttgaggaagctcccctaggcttggtggataggaataccaacagcccatagaacttctgtctggctagataaattttctccatccccccacccccaatacttcatacttcagatcctgtgaggctacctgaacccctcccaccccctcatgacctcctggctgccatgccacatgctggtactctttctgaccctccatcactgtgcataagttagttctctctcccggtcctggatcttgcatgcctacccatattgccaccacatcctccagctcccagagcttgtactttgaaagtcattatcacttagttgtgacatgtgtgtattgtttgggtaattgtcagcccttggggacaaggacctcatttgtctttctcagtgctgtgtccctagtgtctgacccagtgcaggcaggtggtaggagccctggtgatatttgttgagtaaaagaatcattcgtggggcttccaggtcctctaggcagaaaactctgctgtctctgaagattactttctccagtcaaagctgggtgtggtggttgcacacctttaatcctagcgctcatgcagaggcaggtagatttctgagagcccagacagccagggtttttggaacctggtatcctaagtggcatacttccttggcctcatcatcaaagactacttcataaaaacgggatatgtgaagactggctcctggagcggactcccctgggtctgagtttgcagtctgctggctgatcacttattgctgactgtgtcagccagcatgcctgacttggcctcagcaagccactgcctcttgctgattgttagtccccttcctgtgtgcagtggacaggggtatggtaaaagtatcttcactgttgtgctgagcctgggagacccttgtgccaatcccatagcaggaagcctgagggtctgctctcagagcagcggggaattctgagccagggcaggaacctcattctgcttctaccttccacactgcgccagctcttcgtgcgtgtggtgcgaggaggcctgactaggtcagcccctttggttccttccagatcagtgggaagtgtgttgttgccagacctggccccctactcttcctcgttcgtaccctctgtcattccagaaaatgggacttgcatcctccttggggcccaggtgagtgccctagaggaacgtacctccccatggattgtcataaggacctattctggggactccttggtgacgcacatgcaaactgatggtgttgccatggcagcccctcctactcaggattgaatgtgctgggtcagagagtgggggtggagaaagcaggcgctggggtctcatgtcacttgtattgcagtcctggttggctgttgagaacctaccatcctaaaagacttacttttttgcctttacctcccaggactctatcttatttaatgaaaactaaatatgttaaaccctaactctctagaataacccttgtaggagccaatgttcttattagcaaggtcatttgtagattaaaaagccattaggaattctagtagagtgaagaaggtccaagttggcaagacctcaggcctcctctgctctgttcttatgccttatgtagtgctcgagggaaactagagggaagggagggtcccagaaaatctaaggagactgggatgctgggctccctgtagcaggctcttgatagcctggccaggtacttcccctagcatagcatggatctgtggtggtttggccttccctttggcccaaatgtcactatgggcactattttgggacgcctaatttccataatagctctcaaaggagattgttcatctttctgggaaaggtctcaccagtgcgttagcagctgaatggctaggttgctgccctgtccaaagttgttggatggagtggaaactgataggcttttcctggtgttcaaggtagaggccagcactccatggccttctcgtccttcctgcctgcctctctgttactcagattcagtctctgctgtagctggactggacttgtatacttaagtcctcaaatttgtgctctctctttgtagatgccattcacagggcccatgacttccttatgttaggctgatacctcatctgagctgttgtatcccctccccaggacagtccggggacatccctctgagcttggtccttttaagccccctgtatataattcataaccttgtctccccagctatgtctagggtgggtagtacaagaattaacacctctggcaggtgcctcggaagcaggaggaggtgcggaccggagcttctcttctgtttcgggatccttaggaagtacgtttctctctggagccttcctgttatccctgacattagcctacccttccacttaggaaaaaaaaaaaaaaaaaaaaatcttttttgtatggcacaggtcaacctgttctggtccaggccctttttatttcagtctcttgaagcattcaggcattgaccaggtgcctgctctttgtacggctccattctgggcataggaacccagacagaatgagatgacatagttcttgcaaatgaactcacacctcataatctaaagggctttgaatgtaggcgtgagaggcaacctgtcatcgtgggcaggccatcctcagttgggcgtaggaagacttcccaggggaagggtgataggctagttggcaaagagccagtgcctgagagggacccccaaagtatgtgctaaacacctgaccggactcagaagcaagaggatgatgccaagtgtcactgcaggctgggtcaagagcatgtgaggtggtggtcggggaccgctctgtgtgcagggatgaacagagcccccagcactacagtaggcccacagcaggcctctagagctgatggttccaccatgttggccctgtcaccgtcacatgtgcggactctggccgaaaggacctccctgagtccacccagaagacagctagctcacctgtggcctcaaagaccattgcatcactgtggcacttgactgggcgtcctgacctcccagcccctcataaccacgcaccgtgtgcacagtccttaggagcaacctgagagtagcttcttcctcctcacaccaagataaggtttcagtccagtggcccagatgtggcatccttgggacctgggaacgtgggcaggatgccttcctgctcagggagccccagcaccctcggtgcctctgctttctagatttttccagctctaatagctgcagttccgattggctctttccacaagttatttgggttccttacaggaccccagggtcataactaaggactctgggtctcaaggagggcggcgatttgcaagaagcgttagatcctgggtttgtattgctttaaggaggggtgggtgttgttacatctgtcaggcaacgcaaggtcgttgctcatttgatgattagccgcactactcaggcagatccctgcttcttaagaaagtcttgcctaaccctgatccctcggcagtctccctgaggtaggtattagctccgctgtacaggtgagggaaccgaggcttgtataggcggtgactcatccaagccacacttcctgtatgttagaggccagttttcctcagctctgtggacttctcctggatggagcttctccacagaaacttgtggaggtggtggaggagccatggggctgcccctgggacgtggtctcccagctgttgtgtgtgacacatgcttcttcgacacctatgctcccacctcccgtcctcaggccagggactctctgcccctggttctggcccattaccccagattctttttctttatagcctttctccgcctgatagatagcacattctcttcctccatagtgtcctgagcttccagacaggtgcggctgattcccacccccaaacacttccgtccctggcagcgccttctaagagctcgtgctttggggctttatttgtctgtcatactgctttgactagacagtcctctgttttcaacttctctttgggacattccgattacccctccccatttctggattgttgatgatgtgccttgaccgtgccttattggaaccccctctttgttttagctgttctaccaccgacagtctctgctcgccttcctccaaagcctactctgtactgttttccctaatgtacaaccttgtccccccattagcacactgtgtaagacgctgtctgctcactatttatatcctttccactgcaaggtgagggcagcagctgtctcgcctaactggccacacacaccttacgtacactaagaacaatttgttacctgtacacccccccccccccacacacacatgcatgttacagtccctgtgtggaggtcagatcacagcttgaaggagctggtgctgtccaccatgtgtctcccaggattgggactctgctcagcaggcctcgaagcagttagcttacgcatccaggctcccgtctattttctcatttaatcttttccaacaaccccatgaggttattctaatgctcagagagctttaatcactcatctcatgtcacagagccagacagggcagagctggcccttctccagagtgggggcttaggtgtactctgtcactcttaggcaagggtgagagacagccaggaggccctgggaaatggcctcttcactcactgtgatattaggtactgaacaagaggcatctaacacagttcctgttgttcccgttcttggtccctaagatggaggctgttgggtccactggcaggcagctctcatgaccttagctggagcttgaccatgggagcctctgggtggggttgtcccttcttgtacagccagtctgcacagaactgtccccatggcagtgaggcacagtgtaggcggaacaggcagccctcctcatacaggtgttatcttggggtttgggtgtagacttgccatgtttagtactgtggcattgttcaagtgactgaagagacttgggtctggtttcctgtgccctctccatgaggttaccctctttgggtttcatcatgctggtttcctccttgttgtgtgcccttctaaggagtactgtgagacagtgagatggcacagggtggtaagacatctgctctgggcctctgtggcattcccttccctctgtccttcagacatggagtggtccatgggctgtatgcagggatcagcctcctgagtggcctgtgggagccttggctgcacaggactcgtctatttactctccactgtacacatatcatctcttctgtgaaaagccatgtttacaagaggaggttctgttcccttcgtgagtcagggagactgcgcttatagacaaccagaaaggctcggcgttttcagaacagggctggcttggattcttgaaagcagcccaggccaattgggcatccaacctcctctgaggccagccatgttggatttgttcagccatacagcaaaccttcatattgccccacacacaaccccctgctgccatggccccgtgtgaggttctacacacacagatgggacaggtccagtcttggcactcacaagtcactgataggggtgggtgacatgggattctgtgagactggagctgtgtaagcggagaagagtgggtgtgcccagaaaggcttgggatgaggaagttgaatttggctggatgctaagactctcttgcccaccctacctccgagtcaaacaggctgggtgtggaggtggtggcatttgattagcttcctcaccagctggacttctgccaagcaagctggagtagagacgtgttaacaactggatggcaaaggctagttccgccctggggatgtacagggaaccctcacttccgtgttccccaggtgatcgtccagggctgctgcaaactaacttaagggcccaaattctggccaggaggtagacaccagggaccatgagcttgatctaactcactccattttagagagggaaagccacccagttaagttgacataggaattggtggcacggctgggactagaacccaaaagcctacagcccctctgtgctctttaagaagccttctatagcatgcctgtcattcagcactcaggaaactgcagcagaattgcaagtttgaggccatcatgggctatgagacttggcaagaccaaagctaattggtaaaacacaaaatacgaacaagaagaacatgaaaccgttcctgatctaccctcattactttccattacttcccagcatcctgcagcttcctgggggagaagacagaagggatgtgagaccagcagcataggggcccatgtgagcctgaatttgggtctgaatagagtgccacactctgagaggccctggccatgatcagcatcacatgggggtgacgatgacagactcccaggattcccagcttcaggatctcctcgggtaccattcttgctgctctgccatgagccctagggatccgaatgactagggttgagtgcctttttctcatactagccaggccctgtcagggcactggggacccagatgtgaatcagaactgacttggcctctggcagcatctggtctcatgtgacaatcatcttgaactatgtcctttgtacaaggaagagagtgtggaagctgagagggagagcttccttctccatcccctgctgttctctcctcacttctctgtcaaacagaaagactccctggggtggctagaaagcctctgttaggttccaggcttgggtggtccccccgggaattgtacctccctggaggacatacggtcctctcaatctggaaagcctagggtgtcacctctaagggcaatcactgtctcttaggtccctcagggcttccactggcgcctggacttgaggcaggccaggcaggggggatgtgggagtggatcttaggaatgtggtcctgtggttcactcccagcctttccagagatctgccatttccttcgcagaactgctgcgggtcctccctggactacattcctgttttgcaggcaaggcaggcagtaggtggttggtccagtgagacagggtgaggacagagtgatgggctctggcctgcttggatacagacctgcagagtatcgcaggcccttggttttgtctgtataatgggatgagggttgaacaaaatgggtgctcctttctatttacttgtaaacaatttcaaaacacgagggggacttgggactttgttttttttgggggcgtggggttgtcagttttgggcaggtcatatgaccagtaaggagtttctgcatgcctcctccccatccctcccatcccccagctgagtgctggcccagctatggttgactttgctgactgagatgcaaggcctgccagcgtagggtgaaggtttcaggcctgggcttgggcctcacttcccagcaggctcaaggtgtcttcctataccctatgtgcctttccttaaccacccctccgaactctagcctgaggttctgcctactgcagtggtggggctgacagcagaaggcatttgtcatgcatttctttcctgcctagcagaaggctgaaccctggttcactctcttactacatgtgagacttagatacttctagttgtttctcaaatttagcacctgggagtattgtcaactgcagaattgactcagtggaccctggcatttctaacctgctcacaggtgatatgacggtgtgtcctcaaagaatgctttggacaaggcatcgctacaacaccttttgtcttcctgccagtggggtacctggccttgcctgataggcacctatgcttagccctcagccattgttgatgacagtgatgtagccaaccagccttatgtcaggagtttagactatatcttggaatttcattcctcttatacatatgcttgagacttgtccccacatatagtccagggaatgaaaggtcataagacccttaaggatataattgtgacagagtcatttgtcttccctagtgccacctctcctgtaggcaccaggcttcctggcggcattacctttagcttttagagtccaggggtcatcctgggtctacaactacagagccaattaatcaagcacacgttgtcctgatttccagtcttggcacttgcttagaagcaaacataggtacagccctggatcaggtgcttccgtgtgtcctgtgtgtctttgcttaaacaccactccaaggcgggtgtggtggcgcacacccttaatcccagcatttgggaggcagaggcaggcagatttctgagttcgaggccagcctggtctacaaagtgagttccaggacagccagggttatacagagaaaccctgtctcgaaaaaacaaaaaaaaaccaaaaaaacaaaaaaaccaccactccaaacaccagcttgggttttatctgccatgctggggagtgtagctcttcactttaggagaagtaagatacccccgaatcttccctcagccccaagctttgggaactgcatcgaggatgaatgtaaatccctcttaagctggtagtggtctaggatgagagtcaacttcatggaaagaaggctgtccagagtaaagggagtggggcagggatccggaggcgcaaagtacacttggacaaaaatcaaaacaaaatattgcaaattggatgttggacttctgtccttggcctcatagccacaggtatcaaagactaaatatttgtactagactcagataaaggaagatatgtgtttggagcataggagatggaagagatctggcctcctatatatggcccaaatccacagcttgctcttagcttccccagtacgacatccccttgttttctatgatttagggaaggctgtaaagcagccatcagagagacatttggtcgccgagtgagggttcagttatttctcattctgtggcccacattcagctgtctagccaggcatctgtgggaggggtgttacattgaggtgtctgaggctggggagcaggcttgtaaacaaacggacgtcttctcctgcaggcactggctccagcatcctctcagccctccaagacatcttctctgtcacctggctcaacagatctaaggtggaaaaacagctgcaggtcatctcagtactacaatgggtcctatccttcctggtgctaggtaagctcacctagggtggtggtgaatgggggtggggtggacatggttgcatccagtgaagtcatcttcttccccagccgctttccactcactcccatgtttaggtcaaacattccaccattaggcatgccagaaaccttagtccatagatgtagtatggcttcttcatttggcagctttaacttgcccaacctacttgcctctggtgctgtgggctgcccggagctcgtgcccttcttatagtcagtccagcttatctgccagccaagagcaggtgtgttgctttgccgtagagcatgcattgccaggtttgagacctactctgactttccttaggcttcttgagctctcagaacaagcacgctcctcttggatgtgagggtgctgctcacttggtttcggtagacatcgtgggggttgaaaataagggttgaaagccattacacagagcctgctggtggtcccattgtatggattctggccttagagggtcctgagatcccaatgccagtccctatcccctctgctggatgacctccccagggactctcctgcccgcggtggctttgtgacactatttgtgcaggctgactgggtgcttcactgcctgccggctagaatcatttggggtgaaagcaaacactgctctcttgggacctcctcctcatgcccaggccttatgtcctcagcacaggttagtgtctgagcacatgggacagatctgctgcagagcaccacgtgtctgttcttggagccaggtcttcaggcactgtctcttcaaactgcccagggtggcaggagctcaacagacatcagatgatagagagcagctgcccttgaggcaggcatggagcctcagcccacgctgtagagcaatgggaacaaatcccacatgtgccgggttcttggaatgtcttttgtcacattcctcctacacaggtgagctggaaatgtagagctttagtgacagatcatgacacacattaaagggcaagttggagtttgcgtcaaaacctagtgtatccccttaccgtgaggtccagaatcaatggacagagaccacaatattgaactcctaagattaaatgcaaggccatgtaaacatctttattgctacaaagggtggctgtagctatcctcagattcttacagggtcacatggccccagaaaggtgaagaaacaggtttgaggacagggctcagaccctgagtgtggtttgcataccagggtagaggggacagtgcaactcatctttgttcagacaggaaggcagagtctagtggggtcagagccttgtccagagccacagaagaaaatagaaggagccaagacaagaattcagtgaccccagcctctcgggcctctcaggcctttcgggcctctgcctagtctgccttaccagctcctgctgtctctgttttcactagaagccaccacttgccttagtgggtcagagcttggctgcaggggcactgagtacattgtgcaatcctagcccagagagcatgtgatagggactagggactggcccccgagctgtaggttaatgatctgtgaggcccagccacagcccagaaactggctcaacgtgtctttccaacctgctgcttggtgtaggtgagagccagagctgggcagatgatcaggcctgcttaagctgctgttaatgactacatgaacagtcgcagccactccctccctccctccctctgtgtcccaagcctgttagcagaggcagactctgctgggacgctgctacagatcccctccaggttcctcttacacagttttttgttttgccgtgtagtccactagacctccggtgaaagccgagggccttcttggctcctttaattgtataaataaagtgcattgggtcttaaaggaactaatagtgctggaatataaatatgtaaacgtttgaaacccagttggatatttagtcatgtgtgctttttttattatgtgttgagttagaacgtagcagcagctataataattactgatcttaagtagtaatcaatggagcatcatcaagattgctgagactgctataatttgatatgaacacacccttgtcgtctgtgggtatcgtgtcagcaggctttgctaatacttctgtggttgagtgaaggaaatgctaaacttccatgtgcacccagtagaagacttagatgtcactttgccccccccccatacaagtccacaggcacttatgtagtccagatcacgtgttaaattccaacatcatgtcattttatcttgccaacctctgtaagaaagtaaaggcttaggtgtgggcagtgggcaatacatggcggggccaagtcaccgagtccgcttggtcctagaagtccctgctctccacagccctatggctatgtctcctaccgaagagcacccacacacggccctgtactgccagctgggggccagagctctgcagtgtgaggtgcttgcggctgccatgtccaggaagggatgcatgcaggaagttctgggtgaaacaagcaggctgagtcagacactgtgctaacatgtcctgggcccagtggcattggagggcttcagcctcatcacctgaagacatggcacaggcagctgctataggttctccaaaagggagatcatgttatgggctagctcatagttgtcttcccaagcccccctctgtaaggtttttggatacaggatctcattatgtagccctgattggcatgtgcgagcgtttgtgtgttgtgtgtgtgtgtgtgtgtgtctatgtagtccaggttggcctcaacttacagagatccagccttccagagggctgggaataaagttgtgtgccaccatgctcagcaggtagctcattctttttatttaaaaaaaaaaacaaaccctttctatattggtggctggagctggagagattaatctcaccttgttctagctcatagccttagctctgttggataggcagggggtgagagaaaacacacagcccgagagagggcaggggtagccccggctacataagagccagaactggaacaccaactctggtcttctgtcacttagtcatgcaggaaggacaggtgtgaagtgatgaccttccctcccatagcaaccagcctcccagcatcacgggctttaggatgttttcacgacaccctttctgaactccatgagcctggccaggccctggaatgaacagagcctttctttgctttggacactgcagaggctggcactggaggaatctttttctgggaccaaggaagggggccggaggcaagctgtcggaacaatgtactatctgcagcctaaatataggcaggattcttcctggctgccttaggacccacgttatcttcaacagggtgtgcgggctgcagatgcttcctaagacccaacatcctatggatgtaccactgctacactgctaagttgtcttaagaaaccacatggcctgctctctagaaactgccgtctggttttagttctcctagggaaagactcgggaggaagagtgtgagaaccgcaatttccctgttcttaggttcacagagatctgcatctagacttactctttctcatggaaacaactctcagacaggcttaccgttgtagctggcaaaggcctatgaaacctgaatccctctcccacccagtgtggaggattaggcggcaagagatggatgatggggtagtgtgatactgaggggtggtctggaggaacaaggatctgacaagggcttgaagactgggtagaaaccgagaagagcagccatgatgaaggcatctggggtggccataagatactggctctcctcctctctgggccaggtctttcagcaacatggcctgccagtaggtgcaaagtactaagtgtttggggagcgggagtctggtgtgctctggctctggctgggggctgcctagccttctgtatgttacaggggacagctctcctgtgacaacagtcctcttcacccccgactccaccactcacccccttgtcccaccccccatccccatcacagtctgagatttctcacctttggtgaacttctaaggccgagtatggaccatggacttcaaagtctgagtttaaatcctggctctcctctaggtaggcatgggcaagtcgctcctgccacgttttcatctaatgcagaataaaagtcaccctgccttagtgacttcagtggcttagctacttggtagatattcctttcctgtgtccagggtctttgctgggcactggcaaagggccatgcaaggaggagacattaagaatcagcttcactagaagctgaggtctccctctattgcccgtcctgctcatgccgggagctcctagcactaggactcaccagagtcttagtaaatgaggcctgtgcaggctctgctcctcctcactgagccagtgctccacctaccaaccactcccagtgcctaggcacctgggacctctgcctccatgggagcctgggagactgacctgttgtcccctgctcccccaggagtggcctgcagtgtcatcctcatgtacaccttctgcacagactgctggctgatagctgtgctctacttcacctggctggcatttgactggaacacgcccaagaaaggtaaacgtctgctctcccgcctgtgttcatcccgtaccctaacaagctggctctgcacagctgccgctcctcctcctggctgctgcctctttttatggaacacctactctgtgaaagacctgggctaggctgtgtatggtttggggtgggtgatttggagctccctcagtgtgttcacagagctcacctttcttaagggatggctgggggaatgtatgtgggaaggggcccactgagcaggtacagacatcctatgtgggctgctagacagacacatccctcacgggtccctactggctgtgtctcacctcacctgaattgctcaaatgtccctcacgcccactccttttcaacaccgtgttttgtttcctggaaggtggcaggagatcgcagtgggtgcgaaactgggccgtgtggcgctacttccgagactactttcccatccaggtacagatgtgctgtgctgtctcaggaggacaggaataggtgggactggactgggttgaactgtttggggtctcccaccatgaggatctgtccagattccactgactacatcagacccaggaaacgtttgttcagtacatatacttggtaaggtgaaatcaaggccttggagacagagcactgctgtttttagccataaagaggcagagttgccgcagtcggacttggcagccaaggcgacgagagaagcatggtagtcaccggcttcttgtgtgattcttgggggaaagcaagacttgtttgcttctaaaagataattctacaccgagggtctgtgtgatgtaaggggcaggcaggcatctctgtgttttgtggtattgcttctcctacttaagtgaagattgaggttataacttaaaatgaggtggcctgaaaggtgaggggcactaagagggcagggagaaccaaggagagtgtgagaaacagttgtgtgaggagagaggaagcctcgtcactctccatactgctccccccattacactttccaccaaagaggaacctggagattagacgacagcaaggcttggtgaagccagtgagcacagtggaatggtttccagttgctgccctgcctcagagcccgggttcctcccaccgtggcatagtgcctctccattcagctgagtccagtggagaccgggtgctcacgctgcaagatggaggccagtatcatcagtgtgggactctgtctttcaggacacagcctcctgctgtgaagcaggtttagaagttccctatgggttttctcctagcatgcctttggctgtttgagggctttttgctttggggagcatttgtctttcctgagatggagctgaaccaagccccattcttggcttcagctggcccctgccttgtgtgcaggctgggtggtatgttacagaggattgtgagtgggcctggaggtttccccacagtgggaacctgtctggccagcactccgagcacccagccctgacacacccttgctgctaaagccacccagcagaaggcagagaactgaaaacaggcagtatgtgagtgtgaaagtgtgtctgacatggggtggcctgcctttgttgttgtaagtcaggcattgagctgtccagatgagctaccttgggagggagaggtggcccttcctccctcctatgcactgctctgtggcagtgaccctgggctgctcaggagggccctgcctactgctgccgttcccagggtactgtgttcccggcagttaggcttccctcctcaaagggccagagccttgcccaggacgtccagcagtccatggctgtggtgccaggccgtctgacatgtaatccgggctccttctccctggctcctaactgcccattcccctgagagggacttgaccccagccatctctacaacttggaagattccctcttcccaaatctccttgcctgttggaagcagggtttaagttctcgctgtgccgttccattcactgacctgcctgtgttggggcctgtcaggtgctgctcttgggcacagtgatggaggagaatcagccctgggctcatggcctagtgaaccctatcgtactcttacgctctgtattagatttctcagccttccccaatgtcattcgcctcaactgcaagttggagctgttaagtgatggaaagtgagttcatgctagggagatgctgtgagctctgctgtactgacttcccagccactggcccccagcaggctgctggttcccttcccacagcaagcgacttcacgattggtggtcagacccggagcattcagctgttctattccagctgtcctctaccccttcaaaagacccaaatgatgggctggagagatggtcccgtggttaagagagctggctgcttatccaggtagcctgggttcaaatcctagtacctagatggcagctcatagctgtcgaggatccagtgccttcttctggcctttgagagcactgcatgtacatggcgcatagacatgcatgcagggaaaacacccacacatgtaaaataaaaataaatctagtagggcctggtggcacatacctttaatcttaggcagaggcagctggatttcaggccagtctggtctacatagaaaagttctaggctagccaaggctgaccctgtctcaaataaataaattaataaatcttaaaaagacccaatgagcctatattttcactctttctctgtttcattgagctcgcggggtatctgggcctcaccctgagtgtgacaggctctaccctttgtcctttcggctttacgtcaggtctgacactgtgtgccctagagccatgtgtggtgtacctgttccgcctctttttcctgagctcctgccatgggttatgtaatcgagatccccatagacccaagtaccccctctctgtttctccgactgcagctcccctctccaaagtcatccagctggcacggagggcatctcttttggcagtggtaggactggctctttcatcagccactgggactataaccacttataacggaaacgtcccaggtcctgggactcctctccctgaagggtaggcgcgacctttggaaactaggaaaggctctctgggcttcaaatcagctatatgtctaattgcctcatttcatagattgcagatcaaagcccagagagggggcactgttctgcgttcacaagacactgagctgataagcctaggcaggctgctgctattttctgggaccgaatgcctttctctgtatggacctggggtagggtaagcctgccctgggagcagggtgtagggagtgagcagccaggaatgtgctcaggcttatacttaacctggcctggcctggcctggcctggcctgaacaccactggcctgggactttgccacccagtaggcgtgcccacagtagtcagcggcagtgacctttgccctccctgcagagtagacattccgtccagtcttgggaaggatagtgtgacaggaggcagatctagagtatatcacatgtctctattcttcttggtgttacatggggccattaacctgcacagtggcccaagggcgttgagaaccatgtgtcctatcagataagagcctggggggctggggggggatcatttaaagggccagctaggttcccgagaggtggcacatcactatcacagggcatagggaaaaatgaaactggagtgtctttatgtgtgtgtgtgtgcgcgcatgcatgtagtttcattgtgactcctctagggaaggtagtgactcctttctctagacttgtttagtttgtcattgaaaaacagcctaggtcatcagggtactcgagcccattctgcgctttgtctcgctgtcccagccactggctccagagaaagcacctgctacccagcccctccctccgtgcctgccttgctggagacacgggccacagtgcttcactaagagctagctaggagcagacctgctgctgtctcaagcagaacacagagcagcggccttgtacatacagaccatgggcccagctccttggggattctctcagatgtccaccccgtccctggcagtgcccactaccattccctggtaatttggtggacaactgagagttgttttccaggcagcattaagctgcttgccaaagggaaagtgagagtgtcaactacaggaatgacatggagcaaggctcgctcacatctacatatgctacagccccagagttgagagcagcccctgaccctgctcagtccccacctccacctactcatgccacacagagctcctcccccactcccaattgagcagaagggccttcactcagctaggaggttcctgtaactgaaggaaaggaaagttgggtctttagttattctctctagccaggcactctgctagccagtgcaggaagggaagctgttaggcacttagatggggatggtgtgagtgcccctcgctgaggcagggcagcccagaccaacatcgtcggactctctcgactcagggattgtatttctggacgtttacctcacataaacagttggaaatacagataaaagggggctatttgtcaaagtgttattctaggaggggaagtttggaaacatttaaactatttaccagtaagaatttgagtgagtgctgtcatatatggcatggctataataagatagggaagggcagcttggaagagaccaatacggggggcgggggcgggctttgataagcacctcagatagaatgtgtttcctagaagacagtactgatgttccagctttcgagggtgggggggagggtggtatcatcttcatcatcatcatcaccgtccttgccagtatctcattgtgtagccctgacttgcctggaactcactaagtagacaaggctgagattttgaaggaagaagacctgtgcctatttaagtaggaaaagaaccatgtggtttatgtcaatggaagtaataatacagatgttcattctgttttgactttcctatatttaaaaattctgaatattgggctgtcatgggggcacacacttctaatcccagcacttgggaggcagaggcaggcagatctatgtgagtttgaggccagcctggtctacaaagtgagtccaggacagccagggctctgtaacacagagaaacctgtctcagaaaaaaaaaaaaaatccatttttctaatctaagagagtgatgtcttaggaacagaaacctttcttcctccccctctcagcagctctgtcccaactgtactcctagcgatgctgtggcggtatctcaggcttagcacctctcatgtttggggtcttccaggttcaaccccaggctccttaggaagccatttaccacttagagcacctcaggacaactttgttgatagaacaatagttcagatcattagctgccacagccacagagccagccacctccccctcctcccatggatagggctcctggcatgagggccgatgtttgtcctgtcctgtcctgtcctttgctgcctcagaacctaagttgagcctgggtgtttggcaaaagctttgtactagctggcagtgccatccttttgtcacactggagtataaaaggtgggtggtgggctgcatgggcctgtcctttggtccgttaaagagcctgcagtgtgcagggaccaggcagaccctacctccaaggattcttagtgggagacctgaagccatggctccgcttgccaaacttagactctgagctgtacccgctgagggctgggtgctcctgttaggtgtttgtgttccaacttggttacgagttttagggaagttactgtgttagagcccgggagcaggaaggcaggaggctggctgagttagtggtttggggctgtcgttggctgggaagtaaggataaggaagaataaagcagccacccagggaacatgagcccggtagccgccaaccactggcactggggttcaaataataagaatctgaggacaggttttgaaaagtctctgctgtcgtggttgcctagtaacgaggcacgaaacatcaggtcccttcccctttctgggtatgccctgtgtcctctcccagccaggcctaacacatgttttccttgtagctggtgaagacacacaacctgctgaccaccaggaactatatctttggataccacccccatggcatcatgggcctgggtgccttctgtaacttcagcacagaggctactgaagtcagcaagaagtttcctggcataaggccctatttggctacgttggctggtaacttccggatgcctgtgcttcgcgagtacctgatgtctggaggtaagaatccacgtcagctactcctcctgggctccactgtcaaggtttgagcctccccgatgatcatagcaatacagggaacggtagtgccattctcatgaggtgctgaacccatgcaggtagatggcctgcggcgatgctgtaggtcgggagccgccctaggcttcaggatgcatcctgggtgacatcctctcacccgcttcctagatgggccagccgttgtgctgcctattgactgtgcccctgttgtggtccccaccagctggattgcagagctagggcttcatagatcttgctgaattttctcaaaaccactctgtatcttcctccccattttatagataagcaaactgagaatcagaaaaagagaattgcttaggtaggaaggaaggatcctatatcttctaagaggataacaggtctgggacctacctgtagagatttttatttcatccttggttgtatattaggatagggaatacatccgtgagcaatcctgattgtgtgtcccctcgccccaggcatctgccctgtcaaccgagacaccatagactacttgctctccaagaatgggagtggcaatgctatcatcatcgtggtgggaggtgcagctgagtccctgagctccatgcctggcaagaacgcagtcaccctgaagaaccgcaaaggctttgtgaagctggccctgcgccatgggtaagtgccttcacacaagtccagtattttcctctagccaggacaatgcgtctctgaagaaggtacctagaccctaggaaggcaaggatagaagtgcccacactgcatggcttggcttgtccaggtgtaggtttatgcaaagatgcatgtatgtggcctgttgtccctgggcacttacgggtagactgagaagccaggcctatgtaggacatgtgaggggacttcccactagaggggtcagaggtgtgagactcagtggtagaacagatacttggtttgtgcaaagccttgggtttgattcctggttcgagcacatagtctctccctctccctctccccccaacccccctctcgtaacctagaaatggaaaaagagacaaggaaggagatagcattgtttgaagtaccagggaaagccagttggaagggtgacctttagacaagagctggcagcttggaatactgatctttctagaaaaccagggctgtactctgataagcaaagtcactttctaggattccttagacttcttggcagatgaggcgagttgagtacccattttccactgtggaagacagaggatccatgacctggggattagagctgaaggtctaaaagtacctcttatactctgttattgctttccacccacatatcagctatgggagcctgaactagggtgagccaggttcactgcactgacccagtagtccaagccattgaggccccatgaatcttagaatgagctcttctcttgggtttcaggaaaggctgctcaatggtgtgctctgtcaggtcagactaatggcagggagggacaaggacagctagtgtgctgagtctgtgccatgaggtgaatctgtgcctgtgaggaagttgaattgggttggacagcagagccaggccctctcggatgacctgggaacgacatccagtgatggggtctgactgacctgggactctctcttgcagagctgatctggttcccacttattcctttggagagaatgaggtatacaagcaggtgatctttgaggagggttcctggggccgatgggtccagaagaagttccagaagtatattggtttcgccccctgcatcttccatggccgaggcctcttctcctctgacacctgggggctggtgccctactccaagcccatcaccaccgtcggtgagtcctaagcctcgtgctgaaggccatcctgagcatagccggtcacccagctcagagaacatccttgccattaggaccccgagggactgggagtgaggaggctgagccagggccacacacctgtgaggactgggtatggcaccactgggcgtgcagctgtaagagaaagagctataggattggtctgctgctctactcaatagtgtgcccacccaggaaacatctcctaccctgccggctgcgaattcttagcagagaagaggggggaggagccaggtgtcgttgtgtgtgcatgcaatcctagtatggaggacagagacagaactggtgcaggtttggggccagtctgctctccatcacaagttccaggccagccagggctacatagtgaagccctggctcaacataaaataaaaactgcctaacaagagttctaaaaacaaggtattgattcttctgaggaacagaaagaagagtaaacaaacatagacccgtgggacctaaggggacaactagcagtgagtgtttgcttttgaggacaagtcagagcattcagaaaatcaaggatcagggctgtgggggtgtgtgcgtgcatgtgggtgtgggtttaagctcctaagcctgagatctcatgggcacgtgtggctctgaagagtggactggaatgtccaaaggtcaggcagtacccacgtattgagggtgggcatttttgcctgtgctcctcgcagggctgctcgtcttgcaggggtggggtggggtgggggtacagtggagtggctgaggggccgggaccttgagccagtgcagcctcctcagctgcagggtgggaagctgctgcggggcagttggaggggagctccgggcactcttcactcactctggtgtcccctgataagatttcagggctaaccttttggtgttgggttaccaaaggggacttagccctgggagaagacttagccctgctctcagccgtcactagttgcctgtggttcttagtctaggagcaccacccccaagagtgcccttctgggctggcgtgtctcactctggccattgttcaggtctggttcatattgttgaaatatcgtggggttagcttccctgtcgtttctaggggaccaactccctcagccgacttcccggtcctctggctctcacagtctttctgtctcctcttctgagatgctgtccagctctgggtgtgggggttctattgtagacctgtgcgttagggctgagctcccctggatgagattttgaccagttgtggctttctgtaatcacctctgcctgctgggaagagaagctgcttagatgagagtgagatctgcacgcatctacagctttaagggatcccgggagctgttaggtccaggggagaacaaaggttaggatgggccaaaagcagaagccaggaggccagcctggggcttcaggagccttggctgaagctgtggcggtggggaggggtgtgtatgcgtcagggagaagagtctgaacagtgctgctggactgtgggctgggctgggctgggctgtgggctgggctgggctgggctgtgggctggggtgggctggactgtgggctgggctgtgggctgggctgtgggctgggctgggctgggctgtgggctggggtgggctgggctgtgggctgggctgggctgtgggctggggtgggctggnnnnnnnnnnnnnnnnnnnnctgtgggctggggtgggctggactgtgggctgggctgggctgggctgggcttgaacatgttgcaggatgaggcaaagaaggaaagctctgtgagacagatgttgggtggcagatggggaagctgaggctctgagaggtggcggggtttgtcctgagtgaagccaaagctaagcttgtggtccacaccttactcaggaactcatggcagagtgtggagctaggcttcacccgggctcagaggccacactctcgggtggggtctttcccatgctgcccgtagcacagggtcacctcccactgggcacccaggaatgggccactcggtgacgctgactgacagatcctctgtccctcttctgcagtgggggagcccatcactgtccccaagctggagcacccgacccagaaagacatcgacctgtaccatgccatgtacatggaggccctggtgaagctctttgacaatcacaagaccaaatttggccttccagagactgaggtgctggaggtgaactgacccagcccgcgtgtgccagctcctgggagggacgactgcagatccttttctaccgagttctcgagtgcattttgttctgtaaatttggaagcgtcatgggtgtctgtgggttatttaaaagaaattataatttgttaaaccattgcaatgttagatgttttttaagaagggaagagtcagtattttaagctcacttctagtgtgtcctgctcaaggtggaggctgatatttatgggccttggtggtttcttacccaccccttctagcgttccccagacgacagacacttggccctggctagctgggcaagggcagtccttagtgactccagggattcttgagaggcagaggccatgtcccacccgtggctgcaggtcgggttcctcgtaccaaggggaggctgagggcacagctggccccacttggggagggtagataacatctggactgcccggcttgggtctctgctcctcaccctagccctcttctccaatctgagcctaccctggcctcctgtctcctggctagggacacggctgtcccacaggtgccgtcttgggttatctcgctgctgttggctggtttcactctggaggttggcaccatggacacagctcagcgttgctctggcgcatatcctcctgagccacaccccaagtctggtgtgaggaagggcttctcttctcttcacagaggtgcctggcttcttgtgcagcacactgggtccaggacaggaggacccccccaaaccaagcctcacgtgtgtgcctttatgaggcgttgggagaaagctaccctcctgtgtattctgttttctccatgagattgttgtgccatgtcacacttttgtatattcctagactaataaatggaaacaagaacagcctgtgagttgttgcttaatgctgtacgtacacactacccatcctattgcacaggacaaaccacagaatcccttcagtagccctcaaccttgggcttttatgggctgggtaacaactggcttcaagatttagtggctacaagggtggaaagatggctcagtggttaagaaggttggctgcttttaggacctttgtttaatttcttttctttttttttttgtttttttgttttttgttttttgttttttgagaaagggtttctctgtatagctctggctgtcctggaactcactttgtagaccaggctggcctcgaactcagaaatccgcctgtctctgcctcccaagtgctgggattaaaggcacgctctaccaccgcccggctcttcgtttaatttctaatagccacatggtagcttacaactctctgtaactccagttctagggtatttgttatcctctgtgggcacaaggcagatagtggtgtaacaggcatgtgcaggcaaaatacccatacatacaaggtttttaaagtgtgactttaagcatttgctccactgtcgtaagccaggcactggtactttactttgagcctctgtttgctggtgttgctcagtgctaacagcatcctgagcctgagtaagggagagctgcttcctgctgttgatgtgggtgacgtgacgacaggagtcccccccccccttactgttagcggaggccacccgtagctccttgccctgtatacctttccacagggtagctcacagctgagcagcgagaggagccagtgcacagggaagagcaaaagccacagccctgtgtaactgaccttgggaatggtgtcttagccttgctttcattagactcgaggaggtgaatttggagaggcaagggccgggtagcctcattgtaagctcacacacagcatgtgtgagcaggtcctagaacagcagagccggaaggctcctgtgccctttgcttagtctcagctacactaaagaggtggggaccaggctgatgtcacctgatgcgtgtgtggttacaggttttagaaggtgtcacctgcttgttcttattcattcagtttggtgactactcagcagccagaaacccacccagttcgaccacagacctcattccaacctcctcactgtcagcatacccatcccacggcctgtttgccattcctccacctcagggcatctcccctgcctgaagctgttagtgggccgcagagaccgtgggaacaagggacaacactgagggctgtgacagtctctgtagccctacctggagcttcactgaagatgttaggactaagaggtggggtggggggagctgggtaggtagagtagcgggtgcaaagatggagagggccacaccgcactgctgcttgcccacatccagcgcctatggatgcaactgggtctgtgaggcttggttggttggttggttggttggttttttttttttgagggcagggagttccacattccaggcgacaggggctagagagcaggaggcctctgctgacttcagttacattaggcagtcctcaggagcctggaagctcaggccagaaaacagccatttccttctggtggaggcaaggccagttttctcgtgagaacctcaagtccacaccaagttcctagtctcagtctgcaattaaccggacaatagatacaaaggcctctggctccaggctcaggcctagccttaagcaagtatgcaccagtggtggaagggcattcctaaggattagatttcttaccagcaagtgcctactgtgtactgggaaactcagctacctcagtgtggatagtcccagtaggggttcccgtacatcaggcagcagcgtgcccagagctgaagccagctctgatcttttgctatagttaggggtccctagctgcatgctgggaggtttgctgtgctagaaggaactaccttattagaaggtcctctgctgtccatggagaatgggggttgcaggcttggccttctgaagaagagtcatttctagctcagccacaagggggcgctgagaatggttccaccgcaaatgtgacagggttgtctgaaggcctcacagccacagccacaagagggcaccgagaatggttccacagcaaatgtgacagggttgtctgaaggcctcacagccacagccacaaggggcgcgccgaaaatggttccacagcaaatgtgacagggttgtctgactgcctcacattttgacaagaatctagctctgtcctaagctagaagttagagattaatggatttagaggactagacagaaacttagccaccacattaaggtcatagggcaaaaacccactcatctttctaaaagatcccgttctatttccccacggttctgagaattgaattatttccttttttatccctaaaatcatagattactgttgatggactgtcatgcgtgtgtcatggcagacgccgtcagcaccagcctgtaagtgtctcagcctctgcacctgtaaaatgcacagacctcgttttaggaacaacgagaactaagaatgttcaccccagggcttagcctagaggccctatccagaaaacggttgctgtgattttaaattaactttgtcatcgaagcacagcaagagttacaggcagccaatgtaccaaaaaatgaaaagaaatccaatatattaaatagaatatgaaatgtaggatttgtaacacaaagttagactgctttagaagttgagctcacagcctggtggtggtggcagcggcagcgactgctacggtggtggcagcacacagttttaattccagcacttaggaggcaggggcaggcatatctctgagtcccagccagcctggtctacagagtgagttccaggatggccagggccacacagagaaaccatgtctcaaaaaaaccaaaccaaaccaaaccaaatcaaaccaaaccaaaccaaaccctgaagttgagcttagtaccacagcctgacctttctaacctcacgagctgttgctaggacacaaaactgcttatcaccattgtctgccacacaccatacaagttaatagtcgtaaaagctaagtctttttttttctatcattacttttgttgttgttgtttgagacagggtttctctgtgtagccctggttgtcctggaactcactctgtagaccaggttggcctcgaactcagagaaccacctgcctctgcttcccaagtgctgggattaaaggcctgcgccaccactgcctggcaaaatctaagtcttgctagacatggcagtctttgcattaattccagcactgggcagtgtgagcaaggggatcaagagttcagggtcaccctctatctactacacatggctgacagagaaatccctttctcccagctgcgaaactcccttgctatgttaagttgatcaacattaaatcttactgagccaaatacgatgaaaaggataaagcctgctttcattttgttcttggaagttataagatgagcaggagatttttaaagagggaatctcacaaggaagctgcaaatacaaaggagtgagcgaggcgggtacgggcgctcgctctgcaacctaagcagatcgcgatctaggggctgggggcatagctcacactgagggttcacctctcctgcctagcgtcctggctttagtcttgtctcccccattgcagaaacggaaaagtgtaggcataataaagccaggaagactggggaattcacatagaaccatcactaccatccagtcctcaggcctgactcaaatgtcatctgtttgtattttgagacttaggtctctatagctctggctgtcttggaactcaccaggtagacaagtctggcctggaactcacaggagtctgggattaaaggtgtgtaccaccagggctagcatcctttttcttaatgtttgttacagcaaatggatcaggttcaaggcgacgagttacttaattcttccttttcccaacacagttgctctattttttttttttnnnnnnnnnnnnnnnnnnnncccttcggttcagtagctaaggattccagtgcatacctccaggcctggctgcacctcctctggcttggattttgcccccttgctctaggcagtcagctacctgacacctttcttacccactctggttccagcctgtgtgccagggtcaccccccccccccccatgagcaaaccctccttatcatccctggttctgcctctctcctctgggcccttctctcactgatgctgtattgttcatgggttcgaccttgggctcctgtcttgggtcaggtttttttttttttttttagaagaagaaaaaggggaagagctgcctagggagttttgcctttggtatttttgttgctggtgggagtgaggttcttactgtctgctgaaattcaaagttctaaataatatattcttttttataaagattctaaaaataatttttttatttttagctattttcttttaatgttttgcctgtgtgtatctctgtgtgagggtgttggttcacctggaactggagtaacacagctgtgagctggcatgtgggttctgaaaattgaacccaggtcctccggaagagcagccagtgctcttaacctctgagccatctctcctgcccgagttttgattgtatgtgtacgagtgttttgcctgcatgtatgtaagtgtgtactgtgcacatgcctggtgcctgtggaggtcagaagaggttgcaagggcttctcgaactggaattacagatggtaggaagctgtcatgtggagggtctgaatcaaacctaggtccccccagaagggcagccagtgctcctcattgtgggcccatctctccagctcctgagcttggatcggtatgaccaagtctcactctgtccctcatgctggtatggaactcactctggacacctaaccgacctcaagttcttgtctcctggctgtttttgcagtggacaattgtcagtaactccagtcccaggggatctgatgccctcttctagcctctataggcaccaggcatgaacatagtttacatacatacatacatgcaggaaaacatatattaaattatttaatttaaaaaatgcaggtctagactgatcttggactttagacctctaggttagtcttctaatcactatgttatatatccaggcttttcctacagccaagatagtgttctcccccacatacaaacactgcacctctactccccccccacccttttttgagatagtctagttttgaattgattccacctgcctctctaccttgcacgtgccaggaatacagacctgcaccaccatgctatctcagcatgtcagaaattataattgtatatctgtgaatgcacactcgtgtgtgtgtgtgtgtgtgtgtgtgtgtgtttgtgtgtgggcatgcgcatgcctggaggatcaggaacaggctctctcctaccatctgggctaaggggatagagctcaggtggttgggcttgctggcagtgacctttaccactgagccatctcactgatgctcagagtaacatgtccaagacatcaatcagatcacgccactcccttatttaaacccttcaaccattgtctgcttcaaagatatgccaaccagtggtatggtggcctgcaacactcagaggactgcccctgacagatctctagcttcatcccctgcagtcgagtggccaggtcatggggtctgcagtgctaagatggagtggcctctgcctcatgaaactacatataggagcactgtaaactagagcgccacaagtccagtttcactttgagttttgacatgcttgttctttaagaactgaccctccttctcccgcttctcctcagcatggtgctccccacccattgcacctggccgtcgtctccttagttctgtggttcgtgccacatctccaagctgctgctcctgttcctttggccgatacccctccccttgctctcaccaacctctgcacagctgacccctctgtgcccttctggcctccccatgaaagcccattcctagggtctgtcccctctggacacctcttgctggatctgagctggggttctccatgccttacagtgtagtatttgttgtttctctggcttgccgcatgtccccaagctcctgtgcacacatcagcgcatttatagtcaggactgtgaaactatagggattggagcaagcacaagactctgcctgtgtggcagacaaaactttctgtgtgaccttggcaagttcgcttcctctctgtggatctggagaaactccatttggagagacgtggagtggaggtgttttagcttggctctggaattcccagagtcccatgtgttgagggctgctcctcagggcgtgggggaggaggttaggaggtagggcctagtgagggaagttagggcactgggggatggaaccttgagacacatttaggaaccacgatctttctcatttccctttcttaagtgtcttggcggtcatgaagggaacgagcttcctctgtcacacacacacctgccttgatgcactgcagctgccacgggcccaaataacagggctgaaagctggggcagaacaacctctttctggtattaaattgattgtcctcaggtatttggacacaatgatgagctaacatgtgtggtccttgtatgactctcccaacattcaagcatctatccatgctcagtgactttatcctgccatgtactcagtaatgcttgtgaagcccccccccccccccacagggtctggatgctagggattcagataaagagatatcaaaaacagaggtttggggctggagagatggctcagtggttaagagcactgactgctcttccagaggtcctgagttcaaatcccagcaaccatatggtggctcacaatcatctgtaatgagatctgatgccctcttctagtatgtctgaagacaactatagtgtacttgtatataataaataaatacatcttaaaaacaaacaaacaaacaaaccagaggtttacacagagtgtataactgaacacatggatatactgatgaagacatgtgagaaagccatgagggagcccagaggaggtagccatcagctcggatccaatcgggaacggaattggaagggaaaagaggagacgtgctatgcaggggcctgcccctcaggcaggcttggtttgtataggctccttgggaatctgccttctggtttcacaattctgactcggtcttgtgcaaacctctggcctgtgtcaccctgcacccccccccccccccactgctgctccagggctatctagccatcatcctgaaagtgacttcctgtctcccgcaaataaatgttcttgagccagttggtcaggttcctctcactggccctgtcatcttcctctggcctcctcgcctgacgctctctttgcagcctttgcttcagccaaaccatgctgctgccggggtgtgctctgtctgcctgggacactctgtctgttccctccttcctggacaacaccctgttgtttggatcgtcccttcatgggctctcattgtacttcacatgtcctctcagtcactgcagtcagcactaatgagtgagcagtcatctcccgccaagggtgctcttgacagcattttgctaagtgcgggtgtctcaggccggacacttgctgaaggtctagtgggtgacaggttgaacaagtgaagtgatggaggaggctctgctgagaagaagggatacatttaattcaactaagtttggtttgagtgacaatggcctccataggttcacacatttcaatcccgggtccccagcaggtgggactgtaagggaagggatagaagtctggccttggtggaggaggtgtgtcacagggggcgggctcagaggttttaagagatttgtagcatttgcactgtttctctctctgcctgtggttgtaaatggagatgtgagtgcccagctgtgcctcggctttaaaacttttcaagctctgatctttcctctagcctctgaagagccactcacgaaaagccactcacgctggtggggggtgggggggaggagagagctagagtttctgcctggccttcaaccttccagccctcgactgtgtgctgtacctggccactttgtcatctgtactctctacacttacatcagcagttctcaactgtgggtcgtgacccctgttggggggttgaatgacccattcacagaggtcacatgttagatatcctgaaaaccagatatttgcattaagattcataatagaagcaaaattacagttatgagatagcaatgacaatgattttgtgataggggggtgggtggggggcggaatcaccaccacatggggaactgtgttaaagggtctaagcatttggaaggctgagagccactgacttaaatacatacacttttctctgggaaatacacacagggctgaataaacatggtaactctaagcaatttaaagtgtttttttatgtatttttttattttgaaactgccacattacagaccaagttccaagaaatatttggctgcattagaataaaatagcatatatgaaaatagtcctaggatgtgtttcttgagcacttgctgtttccgacacccggcgcactatagttgctatgcattctcttgaatactttgcaagcagcagcttgagtttcccctagtgcttgagtcgtgtgagctgaaatgtctgagttggctcctgaatttgaagtatgcatttctggtatcctgcaggcagccctcgaggagctgagccccagggagggcgcgtgggaagaacagcttctgctcacatgcgctattggttctttagtacccttgtttcaatgtccccaccactgtgacttgtgtgtgtatgagtgcttgcctttgggtctccctcagcaccagcgcgagtactcactcagcgctagtactgagggatcaggctggaaacttgattttggagttgctcaggaaagggctgacttcctggcacctagcagaggagctctctgggcgactgttgactgaataaagtaaaaggctagatggcagaagtgacgacccaaggaagatgaaaagatcctgtgttctctctctaggtccatttttctttcttacatctgtatgtatgtatgtatgtatgtatgtatgtatatgtatgtttatgtgtaggggctcctccatgctacaggtgtatacctgcaagtcaagggacaacttatgaaagtaagttctctttctctctttctctctctctctctctctctctctctctccctctccctctctctctctctctcattccttccctctctctctctctctccctccctccctctctctctctctgccttaggggttccagggatagaactcagcccctcaggcttggcggcaagcacctttaccctcagaggcatctcactggcccatagtttcatttcccttgcgttgtaggccaaaatgatggcctggatattcaaataatttgaacctgtgattataaccatatttggaaaaaaggggtatttacatagatatttttttcttctcctctcccctcccttttccttcattctctcttttgtttttttgagatagggtcttatattgtagcccgtgctgacctggaactcactgtgtagtccattacattcatgacaactgtctgcatgttgctatgacaggcataagctaccctgcctggctctgtagatgtcacttaacaaaggatcccaagatgaagtatgaacggggcgtctaaaaccaatatcaaatgtccccggaggagaaagaagacacaggaagagggagaatgtcaagaggagtcaaagactgcaattatgcagccaaggatctgagagataccagaggctggaagaacaaggagggctgacaccctgaactgtgggagaatacatttctgctgttttcagctaccaagtctgtggtaatttgatagggcagccttggcaaacaagcac

SEQ ID NO: 628 - DNA, 2259 bp, Mus musculus
gtggccgcgcttcgctggctttctgctcatctagggtggcagcggctacctacctcagctctcgccctgctgccgccacggcctgggcgctgtccctcagctcccggagctcagcgcgaagccctggccccggcggccggggcatgggtcaggggcgcggcgtgaggcggctttctgcacggccgtgacgtgcattggcttcagcatgaagaccctcatcgccgcctactccggggtcctgcggggtgagcgtcgggcggaagctgcccgcagcgaaaacaagaataaaggatctgccctgtcacgcgaggggtctgggcgatggggcactggctccagcatcctctcagccctccaagacatcttctctgtcacctggctcaacagatctaaggtggaaaaacagctgcaggtcatctcagtactacaatgggtcctatccttcctggtgctaggagtggcctgcagtgtcatcctcatgtacaccttctgcacagactgctggctgatagctgtgctctacttcacctggctggcatttgactggaacacgcccaagaaaggtggcaggagatcgcagtgggtgcgaaactgggccgtgtggcgctacttccgagactactttcccatccagctggtgaagacacacaacctgctgaccaccaggaactatatctttggataccacccccatggcatcatgggcctgggtgccttctgtaacttcagcacagaggctactgaagtcagcaagaagtttcctggcataaggccctatttggctacgttggctggtaacttccggatgcctgtgcttcgcgagtacctgatgtctggaggcatctgccctgtcaaccgagacaccatagactacttgctctccaagaatgggagtggcaatgctatcatcatcgtggtgggaggtgcagctgagtccctgagctccatgcctggcaagaacgcagtcaccctgaagaaccgcaaaggctttgtgaagctggccctgcgccatggagctgatctggttcccacttattcctttggagagaatgaggtatacaagcaggtgatctttgaggagggttcctggggccgatgggtccagaagaagttccagaagtatattggtttcgccccctgcatcttccatggccgaggcctcttctcctctgacacctgggggctggtgccctactccaagcccatcaccaccgtcgtgggggagcccatcactgtccccaagctggagcacccgacccagaaagacatcgacctgtaccatgccatgtacatggaggccctggtgaagctctttgacaatcacaagaccaaatttggccttccagagactgaggtgctggaggtgaactgacccagcccgcgtgtgccagctcctgggagggacgactgcagatccttttctaccgagttctcgagtgcattttgttctgtaaatttggaagcgtcatgggtgtctgtgggttatttaaaagaaattataatttgttaaaccattgcaatgttagatgttttttaagaagggaagagtcagtattttaagctcacttctagtgtgtcctgctcaaggtggaggctgatatttatgggccttggtggtttcttacccaccccttctagcgttccccagacgacagacacttggccctggctagctgggcaagggcagtccttagtgactccagggattcttgagaggcagaggccatgtcccacccgtggctgcaggtcgggttcctcgtaccaaggggaggctgagggcacagctggccccacttggggagggtagataacatctggactgcccggcttgggtctctgctcctcaccctagccctcttctccaatctgagcctaccctggcctcctgtctcctggctagggacacggctgtcccacaggtgccgtcttgggttatctcgctgctgttggctggtttcactctggaggttggcaccatggacacagctcagcgttgctctggcgcatatcctcctgagccacaccccaagtctggtgtgaggaagggcttctcttctcttcacagaggtgcctggcttcttgtgcagcacactgggtccaggacaggaggacccccccaaaccaagcctcacgtgtgtgcctttatgaggcgttgggagaaagctaccctcctgtgtattctgttttctccatgagattgttgtgccatgtcacacttttgtatattcctagactaataaatggaaacaagaacagcct

SEQ ID NO: 629 - protein, 445 aa, Mus musculus
GGSGYLPQLSPCCRHGLGAVPQLPELSAKPWPRRPGHGSGARREAAFCTAVTCIGFSMKTLIAAYSGVLRGERRAEAARSENKNKGSALSREGSGRWGTGSSILSALQDIFSVTWLNRSKVEKQLQVISVLQWVLSFLVLGVACSVILMYTFCTDCWLIAVLYFTWLAFDWNTPKKGGRRSQWVRNWAVWRYFRDYFPIQLVKTHNLLTTRNYIFGYHPHGIMGLGAFCNFSTEATEVSKKFPGIRPYLATLAGNFRMPVLREYLMSGGICPVNRDTIDYLLSKNGSGNAIIIVVGGAAESLSSMPGKNAVTLKNRKGFVKLALRHGADLVPTYSFGENEVYKQVIFEEGSWGRWVQKKFQKYIGFAPCIFHGRGLFSSDTWGLVPYSKPITTVVGEPITVPKLEHPTQKDIDLYHAMYMEALVKLFDNHKTKFGLPETEVLEVN

SEQ ID NO: 630 - DNA, 52799 bp, Homo sapiens
ggtgggcagataacttgaggtcaagagttcgagaccagcttggccaacatggtgaaacccaatctgtactaaaaatacagaaaaaaaaaaaatgccaggtgtcccagctactcgggaggctgagacacgagaatcacttgaacccaggaggcagaggttgcagtaaatcgagactacaccactgcactccagcctgggcgacagagcaagactccatctcaaatatatgtatatatatataaaacaaactgtttgcttccccaaaatgtggcttctccatgctgtgaacttctagcagggaaggactctactcccaaatttccagcccaaacaccagtgttaaagtttttgtttgtttgtttgtttgtttttgtgcagcaagcagcagaagtgttaaagtttaagtgaaagttttaaaaaggggtatgtgtggttgtaaagaaggcttcttggaggaagatgcatcaagacaggacagatggacagggtgtgaaaaagggggagcttggggaagggcttgagctcaagagcacagtgtgggcagggacccagaggtggaaaagcacgttcaggggcagggcaagtgacctgatgggcctagggagctggacccacattagagcatggcggtgggagaggagtggaggcggctggagagagtggcaggagcaggatgatgtgaggccttgaatgccaagttaaggagctggggcctcatcctaagaactatggggagccacgagaaacaatggttgggttctgtgttctgaagctcattctgggaatctggagacaggggaccagtgaagaggatagtacagctgtctatgcaaggtggcatggcccaaggcagaagagagaaggagagaactgtttcctggttgttgggcatagaggtatcagtgtgaatgtttttgtatgtgtccatgagcacaagtaatctttctcagagagtcagcctaaaaaaaaaaaaaaacccaaccctattcagtttcatgacccagcatacccagcagcctgggggaggccaaagttaccaaagaaagaggctgagagacattcagttaaagcctgactttatagttcttcctcatcaacaccatcctgcaaattcacattcatctacaggctttcagggtgttttaatcccagttatctcacccaaaatatttgcttttccgcctttctttgtgtttcctgtatgcctcatgtcagcatccttgttcaggtcacttacttaaaaaaaaaaaaaaatccataaggccgggctgaggtggagcctggagtgaccaggaaaccactctagaatgaactcctacctgaggcagctcctcctccctagcagagcccacactggcctgctgatcacctccctgctcaggactctgctgataccatagacctagtcctaggccagtttgggaatctagagaggccattgaaaagaaaactgatatatggataccacccctcctcggtgactcaatcgtagctcctgacaactcagggttttgtttttttgtttgtttgttttttctcttgagggttacagagcatcatttatagaatgcagtttatacaactgacctcagaatatggccaggattttgcagctattatagagcatggtctctggagccagaccatctcagcttaaatcctggctctgccacttcctaagctgtgtgaccttgggcaattttttttaacctctttgtgtctcaatttctccatctgaaaaatggactcatatagtatctactccaaagggttgttgtgaggcttaactaaatccacccatgtaaggaacctagaatagtaactggcagacagtaaatactcactgaagtttaacacctgttatattgcctgttatagttcatgaaaactgttgcttctccttttggaaaaatcaggatggcactagcccacctccagtctcccaacgcttctccagctgaacagcatttcctagagattacagattctgtaatctgcaggttctctgagatgcagttggaacaatttaatacagcagagcagtcccatgctccactgtagtctcactgcaaaacagttcagcagcggttctcaaaatgtgggcttcaaactagcagtatcagcatgtcctgggaacttgttagaaatgcacattctcagcctcactccagaacctactgaatcagaaactctgggggtggaacccagaaagctatattttaaccagccctctgctaatgtttgaaaactgccacagcatattatagcacagtggtttatttaggtagatatggcgcagttcattgcccactccttctccacaaagtgttcctgattcccccagaaccctcttttactaacagctctaacttcctccctgtattactgttgtccatgctcaaaagtgctcaatcctccctggattacaggttacctgagagcagtgttgggtcttacacatctctgcactgggcagcccaggggctgccacagggacctttgcttaggaaagacatgctgagtcaagcgtgcaacatttccagtttcctctgactaaggctactattactgagcctctgctccttccaggacccttgctcatactgcattttcctttgtgaattgtggtcatctcctatgctaagatgcctggttctttgtcatttctagtatcctccagttccactgccttctcaggcattttactcttctccctccctttatgtttgttcaaagccctttggagaaggtgtcagagctccaggcaaacctgtcaccctaatccttattttcaatcataatacttctactggtaacaatttgtcaagtactatatgccaggccctgtcctgggcattttacattcattcattcattcacttagagacagggtgtctctctgctgcccaggctgcagcgcagtgacacgatcatagctcactgcggcctctaactcctggactcaagcaatcctcccctccccctaccttggcctcctacgtagctgggactacagacacatgccaccatgcctaggtaattttttttttttgggtagagatggggtctgtctgtgttgcccaggctggtcttcaactcctgggctcaaatgatcctcatgcctcagcatcccaaagtactgagattacaggcatgagccattgtgcccatatggcactttacatttattattttagtctttacaacaaccctaggaggaagatacctattcccatttggatggagcacagggaaactgaggctcaaacacagtaagcaacattaacatgtggcaaggtgggggcttattcagtctggggccaagtcagggtctgggtggatggaccaggagaagggccttgtctaggcatatgtattcatataaaaatgatccaccaacaaacctgtccagtgcccttgctcaggaagatgggtctgaccaggtgccagcccaccagggtgcctttccacagtgtgcagggggcatccacctgaatgcccgtcttcagtgcatcccctggccctgcacttgctattctgtgcagcaggagtttcaaactgtgttccacagagccctggagatagggtgtgtgggctgggcaagtgagagacaaaccctgaggaactgtgggaccaccccagcagcctgtcatccctgtcacttcttgggctctcaaggttgtatttgaagaaatgatttcagctgggcgcggtggctcacgcctgtaatcccagcgctttgggaggttgagatgggcggatcacgaggtcaggagcttgagaccatcttggctaacatggcaaaacctcgtctctaaaaatacaaaaaaaaaattagctggatgtggtggcgggcgcctgtagtcccagctacttgggaggctgaggcaggagaatggcgtgaacccgggaggtggagcttgtagtgagccgagattgtgccactgcactccagcctgggcgacagaacgagactccgtctcaaaaaaaaaaaaagaaaaaagaaaaaaagaaatggtttcactgcttttaaaaagctagaaactactgctgaataataattgtcattttaggtgtctgtttcttcccccagaatgcccctaaggagcaagaactgtacccacagcacccagcacaaggatggggggtctcaggaaaggtcggccagatagaagggcagatgagaaatgaatgtactgggagctctctgtgtaatatcccctcccccaccctcaccccaccccccaattcctgcagggaagaggccttgagagagttgagtaagaaataagcaggcagaatgatgcaaggggagctgtctgtacacattgcaacagaactttctaaaacaagcctggggctgctcccaagggtctcagtcctgccctattcctctactgtcatccagacctgtcacacaagatagggccaaaggccattaccaagctctgctaaggcctgaccttagagctgggaggtctgtgctcttgggttctggtttgaaacccggagccatcttcaatcacccccttccttcctttcagccctacatccatgccatcaaatcctagagactctaaagcttcagcatctctcaaaatcaccctcgcttctcttttgccttgccaccccttcagttcaggctctgtcgtcattatctctctccttcctctcatctgcctccctcccttccatccaatatcacccaggtccctgtgggttgtctgtgccccttcagcaaaggccacagcttccatgtggcagccctctccgctcagcccccattgcacctgcagtgtccttctcttagtccttcaggccagatcccctgtgaggtgactagtcctgggctactgcaccatcccttgagttttctctatagcctgcttacatctttgcaaacagtctttgtattaaactgtcctcaaattacccagtttgggtgggctgtttcccatagggacactgactaatataaggtagaggtagttaggaagggtgccatggagatgacagttaaagatgttcttgcctggacaatgatctttctaaagcataaaactcctgctaaaaacctctatggctccccattgccctgagaataaagtccagactctgtagcctgccacccaagactatataccatcaggcccctgaccacaaagcagcagcagcatgtggggaagccaccaggaagagggagagtagggggcttggacgtgggaggcaaagacttccaagaggagtgcagccatgccacacagctgctctggctggcaaattcctgtgagtaaggaggcgggtgagtttccaggctagagggccatgccaggctgcctctgcttgccagaaccctgcccgcccactctccaagtgagttgagcactgaaaggagtttaaccccaatgggccctagccttgtggcatgagaactggttacatcccaaccccatctggtaagctattggattccctgagctttcattttgccaactgcaaaatgggactaacctcccagggctgtggaggcgatggatgggaatttgctttcgtccagtagttctgctgttacaggtgctccctctcccagccttgggaggcaggaaaagcgtacaggtttgaggctctggaagacttggtgtgaatctcagctttactacttactccttgtgtgatccaggacaagtcactttacttccctgcaccccatgtgcaaagcggtgggggtgatcaccccttgtgtggtggctgtgaggactgggcaagctcacacaagccagggcctagcacagagcagggagcttgatacacgtttgtttctgtctttctacctgtgcctctcttagggcaagtgtcctctctgccttataggctggccacttaccctcctcatgtgtgcaatggaggagctaagactgctatcactgaagcatatctcagaggtgcatgcgtcaaacctctcacaagctacaaagctgcacgtgtaatccccaatggctgtacaacactggtgattgaagtgggtggaggatgagccatccttgtggatgcctctctgctcacacccctcctttggtccatcccccaacaggatgaagtccaagcttcttggtgggaccacaaagcccaccctggtcaagcccttcttggaggcatgacttgaccggtctctgattttcccaatatacacatgggttgagagatgatgaaggaaaggtaaccaggtcctagaacacattctcaagctgttctgctcacacacctgcaggaaggtcagggctggtcattataggaggctaggaatgtcaagaagcatgggagggggccaggagaagtcagagtctggtgtaagtcccccttgcccaaactcacacaggggaaaacagtcccaggacacaggaagctgccatgaaacttcctttccaggctactctaagtttgggtctggttttccttccaaatccaatttggaccaagctgtttaagcagtacccatgggcatggcggctggaggccaaggggaaggagtgttctagaagttgggatgccaggggctgcttgctctgtgaggtggcacagaagtaagcaattgtgcctctcagcccttggactcacctctgcgtcctctcacagatgttcccacacaggaagggcccaagctggggaccagattttatggccctattccccaagcacccacctccaccccaacaacccagcttatcttccttttttttttttttttttgagtcttgctctctcgcccaggctaccaggctggagtgcagtggcacaatctcggctcactgcaagctccatctcctgggttcacgccattctcttgcctcagcctcccgagtagctgggactacaggcacctgccaacacgcctggctaatttttgtatttttagcagagaggaggtttcaccgtgttagccaggatggtctcgatctactgacctcgtgatccacccgcctcggcctcccgaagtgctgggattacaggcgtaagccaccgcgctgggccccagtttatctttctaacccaccaatccaatcaaggtgcatctctgctcacacccctcctttggtccatccccccacaggatgaagtccaagcttcctggcaggacccacgaggccgttcagatctgggccctgtcaacctctccagcctcatttcctacccctcttctgcctgtatctttctttcagccacaccagggtgctcacagggttcctacctccaggcctttgtccatgctgtaccctctgcctgacacctttcccctttccccctgcctcacagaatcagacttctcatcttaggtctgcagcaatatcacttcttcttgaccttcccaatttaccattccctctacttcctctatgactctactatactttttcagggggcaatccaccttggactaagcgtctatgccgagctaggcccacactgggacatagagtgatgaggttcctgcccttgggaaacgcctggctccgtggagaggcaggcagacagtgacagcacagggggaaaggccaaacttggcatagccttccatgttaccctgtgccacaggctggctgtcttgggatcattggctttaggacaccatctctcgattgggtctcctcaaagccaaggactaagtccgattactctctgtgtcctaaccaaggccgggcccagagaaggtgcatagcaaaaatgtgctgaagtagatgaacttgggatctgaatgtttcaaataggccttggtaaccccaaatcttgccatttaagacaatgatctcttacattacagcacagtgataacactcttttacatgctgtgatttcacttcatcctcaaatactcaagtgaagtcagcaaaacagaaactgtcacctccatttcataatgcagaaaaggaaacctagacaagatagcgatactgacttgcccagggtgagtgggtgggccatgagttccagcccaggcctcctccacaggagacccttctggagcaggcacgagccacagactgacctgggatcttccaggccagcaggagtcttgcctccaagagcaccctctctgaggagaggatgccaggatttactggcaccttcagtatcctcctggcttcactcctctttgcccaaaaacaaaccacacctgtttctacctcccagcctttgcacttaccagtccccatgtctccccccatcccccacatgtggcatgccactagcctaccctcagtttcctaaaaggcactaagatctttccagcctcatggcctcaccacatgctgggagctctgcctggaatgcttttctttctactcttggccaattcgggccttggggcccagtaacacggttgagagatttactcctgtggccttgagagggctgaacaaatggaagcatctctaggttgcaccagaggcatctattacctgctgccctgtgcctgtaacttctgtcattctcctctccccctgtgagaacatgataaagaccacaaaggcagggaattcctctcctcttatgctgtgaccccacagctatctcgctccagctatgcctaagaaatctgtcttatcactgacatgcttgttgtccccactcgttccctgagcctccatccaacaagtcgctccaccacatgctggtggatctcgcttcctatgctcttccctagatcaggccttccctccattccctctaccactgccgtgccttgaggctcatcctctctcacatggatcccccgcccctacagcctccccactgccctcctgacctacagcctctcctgtccatttcccataccatggctaaggacacttaaaacccacctgaccagccatttccctactaaagctctcccaagacccggctcccccccaatatctcaagagtggcactcccaaacctctctcagttcaagcacccgcgcctctcacttcagcctcattttccacagttgcctgggctccagccactccagggcccccagccctgccccaaacatgctggcttttctaacactttatgcctatctttctgctttgccctcacaccttccatctgcaaaattcctattcattaatgggcaaaccattctggaatgctttctatgtgccagacactacctaggctctttttataccttatctcatttacttctcaaagtacctcacaaaaataataattattattcccattttacagatatggaaactgaggctcaagagaggcagggcaagaactggactcctagtctatctgattccaaacctgctgtgcaccaacctctctgggaagtgcaccagcgcccccactcccccagcccagggcagagtcttctctactctgtggttccatagccccctggtttctcgcttgtcccggccgttgtcaccagtgactgtgtgcggctgtctctgctgccccccagcgtgagcatcccaagggcagaacctgggctgatctggctgggtccccagcacccagcagggtataggtgctctgtgaggtttcttaataaagagatggaaagccagaagcagtttgggtggttgagatacccagccctaacctaactaatcctgataccagtgaccaaaagcgggaccttcgcatctttgctgccaaaagacagcccctcctaaagagtaaaggcccgaccccctgcacgccctctgcctgcaccgcacgtgcttggttttccccgcccgggtactggccgccgggccgtaccaatctccgcgggggagcgcccggggtcggactgagggagcgaggggaataaccgggcgcgccccttggaagcagggctcagagctgctctcctctcacgcattccccggatccgcgcggagcaggctgctggccagccccgggcccgcgccaagcagagcctcaggtgcggttcccccacaagcaagtggcgcgggcggcggcttagaacggcccgccccgcccgccgcgtcggcgcctgccccgttgtgaggtgataaagtgttgcgctccgggacgccagcgccgcggctgccgcctctgctggggtctaggctgtttctctcgcgccaccactggccgccggccgcagctccaggtgtcctagccgcccagcctcgacgccgtcccgggacccctgtgctctgcgcgaagccctggccccgggggccggggcatgggccaggggcgcggggtgaagcggcttcccgcggggccgtgactgggcgggcttcagccatgaagaccctcatagccgcctactccggggtcctgcgcggcgagcgtcaggccgaggctgaccggagccagcgctctcacggaggacctgcgctgtcgcgcgaggggtctgggagatggggtgagtgccacggcgcaggggttatggacctgcgagaagattttctggaaagggccctgtggcaggctggtgggtactgatgagtccacgttcattctccactgtggcactcatcaatttttacgacctctgttacatcgctttccacccgccccccagcttgtttccctcatccgtgaggtgggagcggtaccacccaccattcttagttattagggatattcgagaactcctccccagcccccactgcggctggtgacccctggcacttccctcccctctcccttcaccaggtagagcgagctttggcagtgatagactggatgggcaggatggtatgggttttgccgtctcctgagacagccaccagacggggaacatgcccgactggaacaggtgtgtctgccctgtcctctgtcccacatccatcctctcgcccaggctctggagcccacatagcagcaactcttgagcctggcatgcttagaaggcagcggagaggaccctgcatgtcctccaaggtagaactgaggtcctcagtgaatcgcgcagagttgaaatcaacccccgccccgcaccccccgcagcttttcccaagcgaggaatagcaactcttccaacccccacctcccttacctagagctggagaaactgaagtgggaggaagcatgcctaagttttccttagctgatgccttgacccctggattcaagtacaaatccggtagaccctgggaagtcatcacagctgtcctggtctgcgtgtgtgtcttgcatgaagcccctctccctctttctaagtctgtattctgtttgctgagcctctctgacatggatttttctttagtaactaacggtcgcctacaccgcccacctttgttacaaaaataaagcttgctaattatggaatttttgaaaatatagacaaatgaaaaaaatttctggtaaatcgactatccaaagataccttcctattagcattttagtatatctcttgatcattttctttatacacattgcatagatacaattgaggacatgctgtagatatagttatgaatcttgttttctcccccttaatgtaacatcgaggtttcccttctgttaatcagaatcacttacaatgtcctagtggttgcaataacccaccctgcagctgtaccacactttaactgtgacctaggcattggcattgcttcttgtgtgattatcgctgtggttatctgcccctcttggtgtgggtgctgctcgtagcccttgaagaggaacccagctgctgccctgtctcgggggcgagcagcttgagctgccccatgtatccagccagtagcctctgacagccccttctctcacttgagtccttttctgttccctgtgtcctttgatgtccttagggacatcaatggatgaatggacttgcccttgttcatgctgttaaaaatgtttttgcactgggcagtgggatagggatgttctctgtggtagtgcttcctggagaccccattccgtcggctctgccatccacaggctgggagctgtgtcttccaggaggcagtgaccctggctgtcatgtttttgacttagagtttgttccttaggagaacttgtactctagcgaatggttttaaccaagccacttaatatcatgtcaggaacatttccccatgttgttatcagatcttgaaaacttttttttttttaaactgggtgcaaggatttacatcatggaatgtaggaagggctggtatgaaatgcaaaccagtcagttcagctttctgggatctactttggtgaaagattgggtggagtaggggagggcactgaagcacattttgttatctgggcatctccattagacctgccttctagatccttggtccttgaagatactccccagtggcctagtttgcctctgtgggtaaggtcccactgttgtgagctggtgaacagcccgtcagtgacagtattcaagtagagaccatggattctgtgaagggaagtcctgtgacgggtgagagattgaaatagataccttggcatctggtttcttggccaaaaaaaaaggccagctgtgggagtatgggtaggtgggtgcatgctgggggaagcgggagtctgtgttgatatttcctaatccttggagggctgtcctgtgccagacgtggagtttgcagagttcatcaggacaggagggatatatatcctattctttatccttgcctttggattgggggctcttcgttcagaagagccctctgacacctgcctgtgtcctcagggttcagcacaggacctagcatgagatgttggtggtcccagtaaaattttgagctgatttgttgtgtgcggctccaaagagtgaggccaggaataggagtgggatgatgggtgcaagttttgatgtagcagaggagtcctttctgacagctgttgaggactgcaacaggctggggtgggtgaggatggagttccacatcactgtggatctgcttgaaactaagtggctagattgttgggggtaactgggaactgagggttgacagtcacctaacctagtcctaagtcagaatgagaacattactctcatgcttccctctccaattccgtgtggcttcccccctcacctacatcacttccccagctgaatagaggccactttggggctgcgtcaccaagggctcatctaggctgagaaaggagggccaagagtaatgttgtattaacaggctcagtgactcaatggtcagtgttgaaatcctgccccacctccaccctcctgccctcaaattcaacagcaagtacttgagttgtaaaaattagtgctggatcgggcccaaccctcatgttacagatgggatcactggagtctccagaaagaagggactttcccagggttatcaaagccaggctagaactcagatccatctcccagtctgtggcctgactccttaagccaagagaagggttgcaaggccgtgaagggctgagtgcagggctctgtgcattgtaggtgctcagtggtttgctgaatgagtgaaggttgtctccatggtgcgggtggcagctcatcccttctcaaactttttgaggaagctccccaagcctgccctagtggattagagcactaagatcccccagagctttggctgccaggtgaatgccagttgccccctacccacactcagtcacacttcagactttccaaactcttcctcctggcctatgaagtaagccccaggtgaacagcctccactgccatcacgacttcctctcctagtatgtcacccaccatgctgcagacgcatggtggtcttcctgttcctgcagcattactcccaattcagtcttacctcagcgcctttgcatatgctgcctgtctgcccaggtcttcgcatggctggctttacaacagtcaatctcctctcagaggtcttccctggccaccctatctagagagccacttccaatctagagagccacttccaatcaccacatcttcttttatttttatagcctttatcactacctaaattttcatgcgtgcttatctgtttaagcaattgtctccccagtaagaatatcagtccctttgccggccgcgtgccatggctttcgcctgtaatcccagcactttgggaggccaaagtgggaggatcacttgaggtcaggagttcgagaccagcctggctgacatggtaaaacccctgtctctactaaaaataaaaaaatttagccaggtgtggtggtgtgtgcctgtaatcccagctacttgggaggctgaggcaggatagtcgcttgaacccaggaggaggaggttacagtgagccaaggttgtgctactgcactccagcgtgggtaacagagcgagactccatctcaaaacaaaacaaaaagaacaaacagaaaaagaatatgagtcccttggaaacaggaaccttgtctgtctttctcagtgctgtgacatctagcacagtgcctggcactggtaataggtacttagtaagtatctgttaaacgaaggaatcattagtgggactgccccattcctcttggaggaagccctgcttttagcttcagtgtgattcctcgagccttccttgggcctcctctgtccctgtaaccacctgtgctagggactgggtgctggggttgtagctgttccctgccctggaggtacccacagtctggcaaggagctggctccaaggctgagtggcaagtgggcagagccagtctcaatggtcacccttactgcttcccagggcttattagaagcccgagagctggggttccaggcctgacatttttctgggatgtggctgggggcttcacttcctctctggggatctcactccttctatctggaaaatagggtcagaattctcagattctcaaggatggagggtttgagttaacctgagtgtgagtgtttgtgaacttgtgacattcatgttagtccttgtcatttgtcctgtgttacacattcagcaggcccccaacactgtagagagtggcagaccctgctctagggcatccaggaaggcttcactgaggaagggacttggggtgtggacccttcattttattgattgagcaccttctgtgtgtcagctgcagtccctgcgtttgaggaagtgagaccagggggatgtacacaagatgactgtgcagagtgatctgagcaatgacaggaaagactgccaagaggtgagaccggggagcttgatcaccctgaggtcagggaagtcttcctggaagaggtgacattcagtccggatctggaaagatgaatagacatcagcaagacaggcaagaacattcaggtacaggaaatagcataaatagaggcatgagatttggatgggagaggcagactgactgcagggcctctgagtgaccaactgaggctgaggtcttggtgtactgagagccagagacaagagagacagagaggatgctggatccaggcctgtggtggctcacctgtgtctgcagcaggaggaagacttgagagctcatgggaaaggagcctggtgcagttagtttattggcctccagcactttgagggcctcctggtatggagctgctggctgatttgagggcctcatgggcagggcccaggggtaggagtcaggcctgggctctgtccagctcctgcttggccaccgaactgctccgcagcctcagcaagccactacccttccttaccctcagtctcctcatctatgaaatgagcaaaagtgtcataagaacctgtgcagattatggtgcagatgcagacaggctacaccctgtgaaccttttgggtaaatcaatagaaatgggaaacacaaactccttttcttattagagcagaattagccattctaagccctgcctctgcttcccatgtgaccttgggtataacactgcctcttagggcctcagccttctcatctgcacagtgaggaggactggttgagatgacccccttggcttccttacatccctgctggagaaatgcgattccattcttgtccctaactgctgtgggactcttgaggtcagccacctcctcattcttgtcctcagcttctccttgtgaaaatggtgcactcatccacttggggccaaggtaagtgccccagaagaacctgtctccccatgcttgcccatatattgtgatggggacgtattttggagattccttggtgacctactcgcaagctagtagtgttgccatggcagccccttccactgcagtagctactttttgaatgtgcttggtcacagtgggtggggtgggggaagtgggcccctggggtcctcagcaatcatgtccagggtcctggatgtagatccatgttcggtatcaggaacatggcattctaagagtctcacttccttggccttacctcttggaactttgtgaaagttctacttgatgaaaacggaatacacaaaaacccaggtgtatggagtagcccgaggatgggcttatattccctttcgggagatcttctgtggataaaaattcatttgtggattctagcagagcacaggtggcccaagttagcagcactcagatttcaacaaatccaccccagcttcctaatttagtgctaatggggaaacctagagaggggaggaagaggcttagcgcccctgcaggtctacagatgctcaggatgcctggctccctgcagcaggccctgaggactgacagtgcctgcagggtcctgatggcccacttcccacctggcacacctagcatagctgtgtgctggctctccagtagtttggcttcccctttgggccagatgtcccagtgggccctgctttaaggatacctcatttgcaaaacagaaccgttaaagcgaattgttaatcttttcagaaaagaactcactggcgttttgggaccagttctatagctagctagctgccctagggctcttaggcaccagtggagggagtgagctctgactggctgtcttctctgccttcagggtagaggccaggactcctagacctagcatcccagtccttcatgcctccctgtttctctacttttccaactagactcacagtctctgtgctgcagtctgactaaactgcttgcagttaattcctcaaacttgtcttctctctgtttcgggcctttgcaatgccttctgggatcctgcccctgtaccttcctcctggaaggcatccctaagaacaccctcctgtgggggttggggcctcccctggattcctagtcctgactgatcctttatgtataattgttcgcagctttgtctcccagccatatcttgggtgggcagcccaggagcagaactcagcctctagcagatgcccaagaagcagaggagaagcagagtctagaagctcccctcctggtgtggagcctggggtgtaaagggtacttagaaagcactggtatgaatgttagtgtttgggttccacccttctctctcccttcctctggggccttccaccattgccccgacattaaccaccctccagctggagaagacctttccctcctgattccccagaaagctctgcttgaccctccatcatggcacaggtcagtcagctgtgggtggacttttttctatctttgtctaggccctgtttattcatcacagtcctctcaagcattcagtcattcagcaaacatcgatcgagcaccttctctgcgcctgaccctgtgctgagcaccagggcccagatgaatgagacatggtccctgcaaatgcacacacataccttttcccataatgagaaagggctgagtacaggggtgagatgggacaggcagggatgcggtcaatccaacccaggtggaggagaaggaagactttccagagaaagagtcaacaggttggtctctagcaggccagtgctcagtgcctggtggatgcctggtatgcatgtgctaaaagactgaccaaactagacttagaagcaatagaactctacctggaggcactgcagtgaagtccctccttcctggagggaacgagtctctggctgagcacatggtgaggcaccaagtggagacagcttcctgtgtgaggcttacgggagcccagccctggcctgggattctaatagcagtgggcatgaccctccagagatggcagctttgccatgaccggcctctcatcatcatgtgtgtggactcccgctgaaaggtgtctgcctggaggagcctggaagagagctcacctccagccttgatgaagtggcatctctttggcacttggcctgacttcctagacctccctggggctggaagagcctgctaggggtcaatatgtactgaccctcactctgctacctctcctcataatatacaacctgttactgtgcacctcttaaaaaactgtttgctctctctgtctccgtgcaacttgtcctcagctctttgggggtaacttgggggtgactttctcactcacctagacccagggcagacattaggtccagatgggcccaggtgtggcatccttggggttggggatgtgggcagggtgacccccacccccacccctgcctcaaggagcccaagaggctgttcacacctctcttagctggcatctttctggctctctcacattgatgccagacattctggcccttttccctaagttatttagattccttatgacaatcctggattaaagctaaggaggacactgagtcccagggacagggagtgatttgcaaggtctcattgcaggtaagaatcagagccagggtttgaatcctaagttagcctgtcgcctacgcctctgttcctaggcagggcaggcattattttacccatcaaacaggagaggacaccgaggcttacttggtaattaatcagcattcatagagatctttactttttatgaagctcttggctatacattatctcatttaattcccacaacaatctggtgaggtaggtattagccccactgtatagatgaggaagctgaagcttgtataggaagtgactcatccaggccacttcctacgagttagaggccaggttctcctgactctcggcccctgttttcggcactgactccaggttggcatgtcccctgccagatgccagtatggaggtgaggtgggtggaggacgcggtgtgggctttcgagaggcgtgagctgcccacagtctctgtctaccagtgcttcgccatgtacgctcagggcctcctctccataggccagggatcctcctgcccctctctctatctcattgccccaaattatttttcttcatagctctcgtcgctgcctgatgttacatcatacattaatacgtaggtgttttatctctccctcagcagaagttaagcatcctaacttaactttagccagtctgacttgggcatccaggcctatagctgcctctgaggcaggacatcatctgctgtgctcactgctgtttccccagggctagtattagcgcttagtaccttgtatgtgctctatgccttgggtcttagctctgtccccacccacctcacccaggaagccacctttgactactcattccaacttctttattctcagcttctatttcaggcagtcactcacccccctttctgggttcttgagtatttgggtctgcctcattagaactccctgcaaggctttgttccagcagtttcccccaaccacagtgcgcactttcctcctgtttgacccctagatcttgtcttcagggccctggcgaagcctcatggcctccttggagcctcctctgcgctaccatcactctgcgacctcttcttgtaacacagacctgtggccatgagcctctggaaaaactctgcttgctcactacatatactccttcccactctggagatgggaggagcaatgccagtagccaccacttaatcacctaacaaatgccacatgtgccttaaacgttttaaaatttaatgttcctggctgggcgtggtggctcatgcctgtaatcgcagcactttgggaggcctaggcgggcggatcacgagatcaggagatcgagaccatcctggctaacatggtgaaaccccatctctaccaaaaatacaaataattagccgggcgttgtggcgggtgcctgtagtcccagctactcgggaggctgaggcaggagaatggagtgaaccctggaggcggaggttgcagcgagtcgagatcgcaccactgcactccagcctgggcgacagatcgggactccgtctcaaaaaaaaaaaaaaaaaaaaaatttaatgttccccaaaatcctgtgaggtgaggattatcaccctcatcctatagataagaaaaccaaagctagagttaggtgacttgcccgaggtcacagagccaggcaagggcagagctggcccagggccctctttctcagatttagggggttggggctcagacactgctgccctcaggcatgtgagaggaagccctgaaaacttgggtttcatcagccccgaggtgtggccttcctggtcactttgatatcagatattgggcaaagaggtgctcacagacacccttcaacaccccagccctgggctgggccctgggtctgagaactgcttgaaagcacatgggttgcgggggtggaatccagtctcactagaacatccacatgagactttgagcatgatatgggcagaggagggagctctcctttgccaggatatgttcctgaagtccaggtgtgggctggcgtgtttggtggggccagcgctcaacagcgtagcattgtagagatgatgagggactgggagcctgaataccttctttaagtcctggctcccacaccctgacctcaagcaagtgattttgcctctttgggcttcacctcacctcagtttccttctctgtgaaacaggattgccagttctccccttgcctaccttcccagagagtgctgtgggacggtgaagccccacataggcgcaggagaaggggattgctttccgggtggtaaaagagctgctctgggcctctctggcagctctactccctctgccttccccaaaggtaggagcaaatgagctgtgtgtaaagcaagtgctgcctgggagcagccatttgagtcttctgttgggaatcttcccctacagcctgtctcatctgcccccataaaacagagacatctgtaggtagcagggttgtgttccctttataggtggagaaacttgtacctagggagggcaaaagaggctcatcccccatctctggggtcagtcctcagtgatggggctggttttgcctcctgccaggcagcccagtctaacttgggcatccaggcctatagctgcctctgaggctgctctggatttgcttatggatttgctcagctatgcagtaaacctctatgagcccctcttaccacagatgaatcaggtaccaagtcctggcacccatgcgtcactggcagtgggatggccaagtaaagtgacattggtgctgtgggagtgtgcagagagagtgcagatgtggtgagggggcagataggagcagggacttggctggatgctgaggctccctggtggccccacccaggagtcaggaacagtcagactgggtgtgaaggtggtggcatgtggtggcatctgattgcagcatcggcatccccaccagcttctgctggactcctcccagccacagctggggcagaggaagtactgacagccaggtggcaaggactggcagtgttttgggggtgcccaactgaaccctcacttcccatctgcctgagcaacggtaccagaactactgcaagatggtaagctctaggtcccaaataccctgacaggagtcctcaggagggtgggtgccagagatcacagacttcaccctccttacccccatttcatagatggggaaactgaagcccagagaggtgaggagacttagcatgggagttggtggcagagctgggtctagaaacccaagtcctgctgccactctacctgctgtagaagatgcctgctcctgacccacccctctgaaggaaaacagatcattcatttctccccttccccttccagctccccaccactgccccctgctttgttgtggggagcagagagaaggaacttggggacatgcaacatcggagcagatgcaggcctgaaggttgggcctgaattgggttcagctttgccagcatctggctgagtgaccttgacccggtatcaccatcaaaatagggtgttggtgccaaactcacaggagtccaagtgcctgtgcaagggcatggagggtctcccaaagctttatgggcctcttgtgcatcatacctttcactcagccctgcatggagggaactccgggggcctgaagagtggccagagcacctccttggggctggcctgacagggcactggggatccagatatggatcagacccaggcctggccttcgggcagcttccagtgtgatggagaatcagcttgtaatcagcagttagaacaaggccagaggctgtgggaaccctgaggaggatgctcttttgtttctccattgtgcgggtctgactttatcttcaaataggttatttctgtgggtggcaagatagcccctggcaattccaggcctgcatagaccttagtgtttatcatcccagagaaggaaaggccttctctttccaaaggcttcctggaagactgctgccttatcaccatctctgggttttgaaggatgtattgctttatctcattatcagggaatcatcaggtaagcaaagcagggaagggcctctgcctagaatatttctgaggtggactgggggctcccactggcccggggttcagcatccatggccaggccagctcccaggccacggcctccatggtcagccaggttgggattgcctgagagggcctgggcctgagaaagcagaggtgcagtcctcccagcttccctctccaggagcctcccaactctaacgcccacggaagcacttgccatttggtatttgggacttagagctcaccaccttgcagcagtcccggtacagttgcccaggcagatgggaagtgagggttcacttggtagactgcatttcccacttgttggcagagcgagctgtgggcggtagttggggctggataaggcagggtgagaaccgaaccagcagtgtgggaaaagcctgagcctgcagacccaccttgctgcgggacttgggagactcccgcaggccctcaatttccagtctgtataacggggtgagggttgaacaagatggcgtgcgtttcctgcgctatgactttacctaattttaagacacctaataagcttagcagagagatttggattaggcacgatgaagaatttttaggtcttctcagttgtttcagttggggatatgtcatcagtgaaatttctatactcctcctccaagctgcatgggggctggccctggcgtcaaggtagggagctagataagttgactcccagcatgcctcttccctacgcacccctcaaaccactggcttcaggggcctgtctgcaacgggaagcaagtcagccacgagaaggcatgctttgcctttttttcctgccaaatagaaggtggtgttccccggtgctgtgtctcaccccagcccctacctgagtgtttggactgaagcatttatagtggtgtttctcagacttaatcacctggggatcttgttaaaatgcagattttgattcagtaaatccagtctggagcccaaagtcctgcatttctaacccgctcccaggtgatgctgatgctgctgttcccagaccacgctttgagtaggaaagtgctagagtacattttgtcttctgtctagccagggcatccagcctgcctcagatggaacaggaactcacctgccacttaaccagcctccggtggccatggctcctgcttcacttcatccagcatggctcaggaggcagagccagctgctggaagatgacttgtccagccccagcccttggatcaagggttcaagcctgtgcttggacttcacttccctcccttatatactcacccagtcctgtcccacttgtaggtgaaggtgaaaggttatgagaccctcaaggataagcatgtgatgaactcatctggccaggtcccactgctgggcaggttgaccaggccctgagcatgaccctccgactgtgtcctgtgtacagagcctttgcactcagagctgctctggggaaaggggaggtcctctaagcagggtcaggaatgctgggtttcagtcctggctctgccgcctactgcctgggtagccctgggctagtcagtgcctgtctctggtccccagtctccctggctgtccaattaggctatactggatgaccccagagggctctcaggctctaagatgggttgctgggcaagtctggaggtgggaaagtcctatgaaggtaggatttttgtaaagggggcgaaggagcaattatgaggcagacctctggaatggctctatggcccagcctctttatttgcttttgtgagttcacatcctgccgcctccaccccagttatgccagtggtgttattagatgctactgaacacccaatttgtgcactgaggatgtggcagtgaaccctgcaagcttgcctggggtcacatagtgagtagaaccaaagtctgaacctaggtttgactcttctgctaaactaagccctttccctctgatgcatcacaccagggaaaggggccatcttgaggcctagcatttccttccttcctcctaaaagtcaaagcagttgttaactttcagctcataagggtagatatctttctaaactctgctgtggctttgttgctttgcagattttgaagaaaagcaaaggcttgagtgtaggcccctaaatccgtctttctccctgctcccagcttgtaggctcagttgaaaggtcatgagaccctcaaggacaagattgtgactaactcatctgtgctctgggtctttcacagagcagatggtatgaaggaatatttaatgggcacacagtaggtgcttggtgaagatgtgttgagcaaagggcatgtagtgggggttcagcaaagaggggtttgaggtggcccacttcttcagctgccggaaggaatggggtatgggtgaggaaccttcacccatgctcttccccagtgctgtctcctgcagtcaccaggcttcctgtccctactgcccatcagctgctggagtccagggtgtcatcctaggggcaccaagccaattaagtgggcacatctcgtcctaacttccaggcttggcacttgattgatagtgaacataattacagccctcagtgtccttcaggctgcctgaagctcactggctactgggccctttggggaagcaaaggctcccaccttactcctttctgggccccacgctttgggcactgagatgaggctgaacatttacatctctctgaaagtggtagtggtgtggggaatcagtggtgttgggggtgggggcaagagggttcagctccttggagaaggggtattagtctgggacatacagaaggcagagcagggattggggatgctcaaagtacacttggagaaaaaaaaccattgcaaattggatgttgaacctctgtccttggcctcacagacagatagcaaaattaaatatttgtactagattcagataagggacaggagtttgactggggtggaggggatgggagagaactggcaattatgagagacttcccaaggcctagcccttggactagcctctttagatacttcatgtggtctccaaaatgaccccgagtgcgataccattcccattgtgtatctatagaaaccagggcacaggggagcatgcagacagcccagagttacaaagccatgaggtggagggctaggatctgaacccaggtctgtctgattctatagctgatgctcttctcatatctagaagggtacctgtgggaggtgaggtttgtactggggaccccatgactggagagaagggtgacagtggactgacatcttccctctgctgtaggcactggatccagcatcctctccgccctccaggacctcttctctgtcacctggctcaataggtccaaggtggaaaagcagctacaggtcatctcagtgctccagtgggtcctgtccttccttgtactgggtaagctgggccttagagggagggcaggtgggcaggcagtgtccacttccccaaaagaggtagagcaggagccctgctctacaggggtgagggaataagagtaactcttacacatgctgccccacagcacctttccacatctatcttttgggtcccagatcaagtgctctacccctcagcatgcatgaagattcagcaagattcagtgggaggtggtgtgatagttcccatttacagatgggaaacctcaagtcttagagaagataggtaacttgcccaaggtcacacagatttgaatccctgtctacaggacccccaaagcctgtgcctttcccacaatgccaccctgcccaccaacagacattttccagcaggtatgttactttgccttaaggtggtttggtgccaggtttaagtcctgaatctcctgcagacaagctctgtgaccttacacaggttatttgagctctctgagtgttagtttcctcattttgagtgtgaggaaagtgcctgcttcacatggcttttttgaggattgaagataagaaatgagagcacctggcacagggcctggtcatgatgggcccccattacatgggaatcatcgggaggtgccctcagaccccactcccagcccacacccatcctcagctgagcacattccccaggtgcttcccgaggcctgctccctgctatctctcagcacagcccacatcggtgctttggttgctttttctgcaggtctggctagataccctcactccttaggttgccatccaggccaggggcaggacaacacgaatgtctgaggggagggaagaagcctcttgtttttccccagacccctgtgctctcagcatagcaggtagcttcctcagcacgtcaaggcagatgaacctgctccagagcatcacagagtgcattccagtgcctgtgagccagtccctctgggcaacccactcttcgggactgtataggctggtaggggatcatcaggacttaccatgtcagtgctgagcagctgtccttcaggcaggtgcatggggcgctctgagactgagaccatgtttgcagggccaagggatagaacttcacaggtgagaaaatgcaaattcacaaaggttcatcaactacctgctactgtgaagctcattaaatggcagagttgggattttagcagaaactcagtgcattccccagggagcccacattcctggaagcccagaattagtgaactggggctgaaacagccagtcttcacctttaggcccaagaacgggctttgagtggggggatccatgaacccttaaaattagatgcaagattatatatgagtatgtgcacatttttctggggagaagggccatagctgtcctcaaagtcttacagggacaggtagcctcaagaagacaaacactggttggaagaactgagcaaactaaacagtctccctcaggactcagacccctaacatggcttgcatttggccacttactagaatcctagagtagtgagcacagtgtgaccccttcttgttaaaaaaggaagtggaggcctggcgaggatggagccttacttggggtcacatgagaagaaagtactgggaccaggacaagaacccagggactccagcctcccagaccccctgcctagtctgctacaccagctctctttgttccctgttgcaccccaaagctaccactatccctgtcttaatgggtctgggcctggctggtagggagctgagcagcttgtagaacaccagctcacgcagcatgtgatggggactggccccaggctataggttaataattgatcagacccaaccacagcccagaaaccggcccagcatcttctcaacaccctcgcctggcctcacctcgcctcgcctcgcataggtgggaacctggcctcgttggacaggcagatctcctgagctactgctaattactgccctcagcagccccagccactccttccctctgcctctcaaacctgctggcagaagctcacctggcaagcaaagaccgtggtggccctgttggtctctccctggaccagagatttttcaccactttgtgccatggaaccctctgtcattttgatgaggcctatgccctttctcagtgttttagagtatttaatacaaggtgcattggatttcaaaggaaactactgataataaaatataaatatctatacattaaaaaagctgattagacatgtagtaacaggtgcctttttattacagtaaataaaaagatctagcagcacatgtaataattactatagttcttaagtagtgatgagaagaaatgattttttttaagatatctgcaactgctacaaagttatatgaaaatacctttgttatttatttgtgtcataagtactgctgataattctgtgatttattatattggtaagtgaaggaaatgccacatttccataagagataagtgaaaatttagatgtcatttgtttccccatccaagtccatggatattgtgtgtcaggctgagtaagttcaaacatcatatttaattttcccaataccctgtaaggaaattaaggcttaggaatggggcttggccagcaagtggcagggccaaggctccaggtctgtttggtctcagagtccatgctcttcaccaggccacactgctgccttccctgccattgagcatccacaggctgccctgcaccacaggcctcgtggcttcagaattttgtatcacaagtgtctttgtaggccaccataatgtgcaggaagcaggtgatgtgtgaaagtggtcctgagccttccatgtgtggggcaaagcagggccttctaagcttctcatgagctcagcaacagtggtttttactgcagccccacaacctaagagcatggaaccagagcctgttgttcagaggacaaggattaggctctgagaaaggaaggtcatttggtggatttagttcatccttttgctcttcctgtgtttggtttctggggctggagagattaatctgacctggtttctgctcccaaggagctcgggctgaagggctgtctgttagtgggagtccaatgagggaggcagatgatgaaagggatggtgagtggtttcagagagggctgtggacacataggggaggggagggagcccccagctgagaaaggccaggctagaattcagtctctggataccccatcaggcctcttcttctccatccaggctgcctcagcagcagagtaaggacaagtgggtagggttaccccccttcccagagagaccagccctctaagcagtggggcctggagctcagccccctctggtccttttacccctcaagagagttagagatttctggaagctaggtttccaggatgctcagaccatagcctaaacctcatcgtccctatctggcccacctggagcatccacctagaggatgccactagaggagcctggatgcctgtagagtctggggggctagagtcttcccttttcaggcccaagaaagggaatcaggcagactgctgaacagtaagtatgactttgtaggcagcctttagacatagctattcaccaagctaccgtaagcttttcacagtttgcttttaacaggctcttgtaggctgcacatgcttccctagaaacttgtcttcccttctgcgatgtcacacccctaagctggtcctgaaaaattggacatctcgtcactctgtattcactgttcctcccaacaagagagttgtaccctgtttttagctaccctggggagaggctggctcaggagtctagaacagggctagattggggggcaacaaggggctaccatttccctccctttaggctcatggagagtctacatccagccttatcttctcccatgggaaaccaaaggaggctcaacatggtgagaagagagcatgacatccagagccaggcagcctacagcacctgggaccaccagggaatgggcacacagcaagggttggcctcccttcttgggcagtggaaaaagtcctagaaggagtccatgcttctcccaccaaacatgagtacctgctgcccttgcccttgtgctgaatgccaaggaccaaagaagatgcctccccacccagtgtgggaaattcacaggcaagagatgatatgtagatagtatgatattggggaacacttcttgaagagctgaggtctgagataggccttaaaggttgggtaaaaaatggaaagagagaagccctgctgagggcagctagtggcgagccatgagataaagcaggcatggcacaagctctccttcctttctgtgccaggctagattagtctctcttatgacctacaggcccagaacatggtgaccagtggaagccagcccccaggcaagtcttccaagtgtgctgttagggtttttttttttttacttttgagacagagattccctctgttgcccaggttgcagtgtagtggcgcgatcatggctcactgcagcttcaaactcctggcttaaggagtcttcccatctcagcctcctgagtagctgggactacaggcacatgccaccttgcccagctaattttttaaatttttttgtagagatggagtctcgctatgttgcccaggctggtcttgaatttctgagctcaagcagtccaccacctcagcttcccaaagtgctgggattacgggtgtgagccactgtgcctggctgctgaagtttttgaagacagggaggctgatgggctctgcgctttggcctgggacttcctggattgccgttatgttggaagggagccagccctcctcctgggcaagtgtcccctctccggtccctctagtgatggtctgggactttggtgaatttctaaagcctaatacagagaacggactgtagagtcagacctgtgtttgaatcctggctctgccactgtcctgctgggtgaccttgggcaagttatctcccccttgagcctcagtgttcttatctctaaaatggggcaaagtcaccctgccttacacttgagacagtggctcagccccagtcttgagatgcagaggcactgggtaggtgttccctccccttatccacagtgtctgggctgggtgctggcatgggggcgcacacaaggaggggacagtaagagcagcttcacaagaagctgaagcctatctcctttggtgctcctgtccagataacatggagcccatgggcccctcgatgccaggacagtccatcagagtctgggagatgaggctcctcttgtcccaggaatctgctcctacctgggctgaacattcctgtagctatttctcagggtttgtgggccccatgcccatggccctgggtgtgcctagcttagtgccacagtaaacactcactccatccaccatggcccagaggggagatgaagcccagtaggacctgacctgtggccatctgccccccaggagtggcctgcagtgccatcctcatgtacatattctgcactgattgctggctcatcgctgtgctctacttcacttggctggtgtttgactggaacacacccaagaaaggtaagtgcaaggcctcccttgccccacctctcattctagggatgctcttccccctgcacaagctgaagggcctcatcctgagtgctgtttcttttaacacccactttgtgaaaagcactggactagtccttttggggggaggttaaaagcccctcaaagggcactgttctggtcctgacaagagttcacactcagtcgagggtttgcataacatgaaggaatgaatgtggaaaggggcctgatgggaagggggcatggtgcatggggtgatggtcacctgcttgggtttcacactggccctgtcttgtctgccttgcccaaatgtacccccacccccaccaactctgtattttattccctggaaggtggcaggaggtcacagtgggtccgaaactgggctgtgtggcgctactttcgagactactttcccatccaggtaaagtgctgtgagtgttgttttgggagggtgggaatggatgggaaatctgaactcaggccttaacccacccacggggaagcaagtttagaccaagttggtctcttcatttcctttctactgtgtcactggctgtgctggggaccccactgctcttctgagtatccatcttctttgggccagccctgaggtcctgacagggaaatggtggctcagtttggctttcagtctcagctctgtctggcccctgcctggtctgcaagctgggctggtgaggcacagccatctggccctgatgcatgtgggcaatcctggtgaattgaggataactctggcaggatcctgaaggttttccccacaggggaaagacctgtctggccagctcactccacaccccagctccagcacaccctagctgctgagtaccctgcagaaggtaggggtgctgaagagtggaggcagcacgtgaatgtgaaagagttctgtgcagggtgcagggtggtgtatatttgctgttgtgagtcagtgactgagatcctggtgtgttgcctgggggcagtggctgggtaaccctgcatccttcactgcattcggtattttgggggtggcagggccagctccttctgctcatccttagcctaagcccagtcttcccgggaccttcctgctcctcagggtcagcgttccttctccttttcctgaccccatctctctaactgcagaaaatttgaagctgtttttgttgggagaaagttgcatcataggacccaaccctctaattttggaggtaaagaaactgagcctcagagatgggcaggacttgtccaggctgcatagtctagtatgatggcaacattgcaaccaccatccaggcttattgaattcagggcccaggttcttttccactgatttcctactgcctgtttctctgggagagattcaatccctggatttccccattggattgattccagcttcctgggtctccctctcccccgttgctgctggagatctcagtttaagttcctgccctgtcactccatttattaacctgccaccattgctccctgtccagtgcagggctgtgctgggcatggggacacaagtcagccctgcccttggggtgtctattgcatcctgatagactttgtcactttctgccatggggccatgggcagactttctcaagcctgctgagcctcatctgcaaaatggagctgtctgtatgatgaaaagtaatcagttctgattgggtgggagtgatgatagactgttctttctgctttctctctcacctcaggggccaggctccagtgttctctgttgccactgtggcctggtcctctggaagtctccaggaggccagtagccccatccacttagaacaggatgacctgatgattgttggtcagacctgggacaggcaggtgtcctttgctatctgatctccacccttccaaaagaaccaaacaaacccctgtgtccttctcacatctctgttccaagaagtcagctgggagttggagccttagggcacatacaacctggccctgtgagggctccctggggcactaggacaaaagccaaactgggcccgaggcaggctggggtgttgagcctcaacccggggcttaggctgatcaacccggggcttaggctgagcctgcctctctccctctgggcctcaatctccccttcacttggccttggtgatctgacatcaggtctgacactctatgggggtgtgtgtgaccctcctgtcccacccccttttcctggcctcttgccagtaatcatgtaatgaagatctgccgctgtacccacccgcccacctactcccttcctggtgggactctggtctttgctgccagaacagctcatctggcccagagtgtatcccttctgttggcacaggtggggttcttgtgttagcaacagccaccgagaccaccagccacctggaagaggagcagacagtgccccacatcacctctccccaaagtgtaggcagaatccttggagaggagactaggaaacactctctctaagcttagaatcacctgtccatctgcctcatttcactgataggcttactgaggcacagagaggagggactatcccaaggtcacaaagcttaagtagtagcaggactagtgtaggaaccagggctgtctgctttggggcccatggtcttactcctgtgttactttcaccatcaccatgccgtgctgtgtaaacttaagcaagcctttgctcttctgtgggtctgaattttttcctctatgcactgctgtggtgggacaagcctatctgagcaccttgcctctcctgggagggagggtataaagagtgacttgataggaatgtgtcccagactgacattagcgagcaggccgggcctgggcatcgtgttgggctgggactttgccacgggaaacaggcagcaagaggacacaagagcaggcatgtcaacagaaccttcattggcggtatccttcccctccttccagaacggacattctctccagccctgggggaggggagtgtgacatgaaaacagatcagagctggtcagatgcctacattcttctgggtcctacagcaagggcattgacttgcactgtgtcccaaggcacctcattcaaccaaatgtcccatcagagccttggggagggaggaaatgatttaaagagccacctggggcccactgggtgacacatcttcatccagcagcccagggaaaagtgcagcgactggcctgctccagatgtgcaggataatttgctgtgacctccacaggggaattgcagctcccttttctaggcctcagcttccccccgtcatccaaggaatggcttagacctttcagggctctgccagcccatgcagtgctgtgggttcctggttatcggcccagtgggaaggtcgggggagccataggaaggggacaaaaagatgctgcacggcgtgatggtcacctgccagggtaactatcccaggcctggccatcagctcaggagcaagtttccaagtttcccacctggtattggctgccccagctcttccctcaatgcctgcctgcctttttcatcaaaactagcacaaggaactttttaattccagcttcactgagagctaacttggtgggcagacctgcttgttaggcaaaacattggaacagcaatcttaacagagctcatgtaaacgagattttgagatctgctcgctgccccgagccccactagctatggattagactgctgctgtttcccatttatttggggagtagctgagagttggtttggtttttgagcaactttaatctgtttgccaagggcaaagcgggagaaagagcatcagtgccccaagcagtggggatgagagtgagggagtcttgctcacatttgcacagactggcagcgtcagagctgggagtggtgccagccagccttttccatcccctctgtcacctgaagatttgcatttcaattttccaaggccagccaccagcaccctctcccccagagctgcacacaagtccttcagctctgccaggaggctcccaaatctggagtcacagaaaacctgggctcttgacattctgctggtggccagtgactctgcttccagctggcaccagtgcagggaaggggcactttgcagcactcaggtgggagtgtcattgatgtcacctcttttgaggcagggcagccaaaaagaccaacgtgttcattccttgttatccaggaattgtatttctagaagtttgtttcacaaaagcaatcagatatgtggacaaagataaggtatttattgaagcattacttctaagagggaaattttggaagcttttaaaatgtccatcaatcagggtttgagtcagtgctgttacatgcatgagagctgtgctgtagaatacaaatgcagccacgagaagatatggaactgagggattttgataaggacagatagctgtatgtttggtagaaaatgatataaaaatgatatcaacccatataacctcaattttgtgggttttgaaaaagagcatgtatatttttgagtagaaaaaggactcaatgcgtcagatggttttatctggatggaaatattatggattttttaaattttctttttgctttcctatatttttaaaattctctaggagtttctcttcttttccctctcccctcccctcccctcccctccccctcctccgttcctctcccctctcctccgttcctctgccctctcctccgttcctctcccctctcctctcctctcccttctctcctttcttcctttccttctttcctttcttctcactctgtcactcaggcttgagtgcagtggtgcaatctcggtttactgcagcctctgcctcctgggctcaagccatctttccacctcagcctcctgagtagctgggaccacaggtgcgtgccaccatgcccagttaatttctgtatttttgtagagataagcgtttcaccatgttgcccaggctggtctcaaactcctgagctgaagcaatcctcccaccttggcctcccaaagtgttgggataacaggcatgagccaccatgcctggccctattatttttctaatcagaataaaaatgatgtttttatgagcagaatacccttactcattgtctctctcagcctcttccacccccatcacattccttgtaacacagggtaggtgtcacaggctttgcctctcatgactcagggtttagggacactgcatcacccaccccttcaagcaccagccccagggcaggaggtgggccctgaggaagccaatcatcgtttagagcatcccagtgtccttagtaccacaggtcaggtcctcagctgctgcagccttacaactaacctctaccccaggctggctggcacagggctgtcgcttgtcctgtcttgtccttcctgccttagaacctgaactgagcccagctgactgtgggaaagtttccatttgggccagctgcagtgtcccttttccaggccaggggagtaggaggtgggctgcctgtctcattctgtgagctgtggaggagcccacagagcacagggccaagtaaaccctacctccaaggagctcacagtttggagagactgacagtgggggcagagcttgcagccaaggccccggttgccaaactcaggaacttggactttactcacatgaagccagacacactctccagtctaagagtgacaagggttggatttgagttttagaataatcactctggctgttgcgaaaaggatgggcccagagggagggaaggcaggaggctggcagagtgcaaagaagagctgctgtgtgcatggctgaagactgagaggaacaagggcaaacattgcccaccccttcccagagacccacagtgcaaatggtgactgcccaacaccagcactgtggccctggggatgagagtctgaggtaaggtgtggagattcattgcagccctcaggcccatggaggtccaggggaaatgacacatccaatccctccctaccctccgggtatgccccggtatccctctcccagccagtttcctctgacccaaggtcatccttgcagctggtgaagacacacaacctgctgaccaccaggaactatatctttggataccacccccatggtatcatgggcctgggtgccttctgcaacttcagcacagaggccacagaagtgagcaagaagttcccaggcatacggccttacctggctacactggcaggcaacttccgaatgcctgtgttgagggagtacctgatgtctggaggtaagaatccaccccctgtgctcctgctgggcactgttgtcaaggcctgagcctctccatcgggcagggtgacacagggagccaacacaccattccttggtgctgggcctgcattgggagatgcaacctgcttcagacatggtgggtcagggctgaggaggagagctgtccatatggtcttgagaattcaactcggataacatcttccctaggaggccttctttgacccccttttctggggacccccagcccttgtgttgccttttgtacaacctgattgttgtccatggcactgtaattgtccacctgcctgagacctcccaccagactgatgcattgggatccccaacacctcgcaccgacttggcagaattagggccctgggaatgtttgccaaatgcatgagttcccaaaacaaccttgtatcattagctgcattttacagatgaggaaactgaggctcagaaaaatgaatagcttacacagaaccagacaactccaaaggggctgggctaggtctggggcccaggtccagggttctttatgttttatacctgactgtgtgccggggatggggagtggatccatgggcaaccctgactgttgcgtccttccctcccctcaggtatctgccctgtcagccgggacaccatagactatttgctttcaaagaatgggagtggcaatgctatcatcatcgtggtcgggggtgcggctgagtctctgagctccatgcctggcaagaatgcagtcaccctgcggaaccgcaagggctttgtgaaactggccctgcgtcatgggtgagtgcctccctacacacacacacacccctccagtgcccctcagcccagggcagcagactccttggcccctgaagacaggacccagaccccaggaaggcatggaagggagtcagtcattctgttagggaggggatgttggagcccagactgcacagtgtgggccaagtttgcccatgtgtgtctgggtgggcacagatgcaacctgtggcctgtgggcccttgcaggtgggccgagagtccaggcttatatgcaggactggaccacctggggccagaatatatcattttgctgggagaccaggaggtcaggaaggagggtggtgtggaatgtggctgggggacagcagctgttttctctgtcccctggggaccttacctcaggctttggaagaagaggctgccctgcaggctcagccctgggccagcccctggggacacattcatattggacccagtccctgccttcagggagcaccaagggtgggggagggtagagggatggacagtgacaacacagtgtgctgagactgtgaaacaatggtgagtccagggctgagagaggcctggtttggtggagggaccaagagaacttcctggcagaggcaggccctgcaggaagaggtggaaaacaggcattccagagcagggcgctcagccttccctttgcctgggggacccagagctctgatatgctccccagtccctagcagtggggcagaaggcccatcagaacctggtagagagggatcatgtgaacttgggacacccaggtaattctggtacacccagctgggggagggggatgcttggccagtgtccagggcctctaggctgacatagaaactgaagccagtaagtagggtatgacagaccctggcctctcccttccagagctgacctggttcccatctactcctttggagagaatgaagtgtacaagcaggtgatcttcgaggagggctcctggggccgatgggtccagaagaagttccagaaatacattggtttcgccccatgcatcttccatggtcgaggcctcttctcctccgacacctgggggctggtgccctactccaagcccatcaccactgttggtaagcccctagcctgcagaccaagggctgtcctgaacacagggtgccatacagctaatcagcagtagagacgggattccaatgcaggccacctggctctgatggccatgcccttagccatgaggactttgaagtgttgggtgctgatattggtcaggaggggtagtagtaggagtcggggaattgagcctatgggatgaaccaagctctgtgataagtgaggaaagaaaatctgcagtctctgggtttgcagcacccactagtctatcagggaagactattgcagcaaagactagtgggggaatgtgatgaggatgcgcaggtgctctagggagtcatagcggaccccagggaggaggtaactcttgcactgctaactgataggaattatctagcaaaatagaggaggaagagaatttttatcagaaacaatagcctacgtgaagttcagaagcaagattgtgtagtttttttgaagaacagaaagaaaaacattaatatgactgcagcatagacctgtcagaagagtggaaaacactggttgcacttggccctcgtctgtgttgttttgggtgtatttgggaccatttagaggattctaaagaattacctattgtaggtgtgtgtgtgcatgttaatggatcccccaggagcacatgggcccttggcagtggacttgaggggccaaagctcacacagatcctttgcgttcctaggccaggtgtcctgccttgtacttttaggtagagacaaagcaacagggaggcagcaggaacatttccatgcacaggtgtggctggggaggggctgggtcctgtgggcaatgtgaaggaatttgctcttcaccttgagaatggagagccaccagagagtgtttgggaggggaagttcagatttgcatttaaaaatgatccttggagctgctggatggaagatgggttagaaaaatggaagccacgagaccagcccagagactgttttggtagccagtggcttggaccaagggagtagcagtggagatggaagagatgtgcatgatttgggaaaaatttcagaaatagcattggcaggacataggaatggattgggtatggagatgcagcaggataagaaaataaagcaacgcacagatcataaatgctggtctactccctcctctcctgcccttaaccacactttttattttttttttttttatttttgagacagggtctcattctgtcatccaggctggagtgcagtggcgcaatctcggctcactgtaacctctgcctcctagtctcaagcgatcctcccacctcagcctcctgagtagctgggactacaggcgtgcaccaccacacccagctaattttttgtatttttttttggtagagacgattttcaccatgttacccaggctggtcttgaactcatgagctcaagcaatctgcgggtctttgcctctcacagtgctggaattacaggcgtgagccaccactcctggcctacactttttaaagcatgtcacattccttgcagaatccttagaaaacccctatgaggaagaatccccatgtgacagatgaggaaactgagggtcagagaggcaggaatggcttgcccagagcagagcaaaagcaaagatgtttacttgatcccctgactctcatagaccctcctagcagaatgcagtgggttcaaccagtcttgatcccatctgcagcttagcacctggtggcctcgggtgggtcccttcacatgcccctgggcctcagtcttttcatctgtaataggggacaaccagagatgcagcacataaagcatttggcacagttccttccacatggcgggcccacagcccagcgtcaccaccttcagcatcatggtggatgcccaggggaagggtgttgactaaccagaagcctctgccctgtccctgcagtgggagagcccatcaccatccccaagctggagcacccaacccagcaagacatcgacctgtaccacaccatgtacatggaggccctggtgaagctcttcgacaagcacaagaccaagttcggcctcccggagactgaggtcctggaggtgaactgagccagccttcggggccaattccctggaggaaccagctgcaaatcacttttttgctctgtaaatttggaagtgtcatgggtgtctgtgggttatttaaaagaaattataacaattttgctaaaccattacaatgttaggtcttttttaagaaggaaaaagtcagtatttcaagttctttcacttccagcttgccctgttctaggtggtggctaaatctgggcctaatctgggtggctcagctaacctctcttcttcccttcctgaagtgacaaaggaaactcagtcttcttggggaagaaggattgccattagtgacttggaccagttagatgattcactttttgcccctagggatgagaggcgaaagccacttctcatacaagcccctttattgccactaccccacgctcgtctagtcctgaaactgcaggaccagtttctctgccaaggggaggagttggagagcacagttgccccgttgtgtgagggcagtagtaggcatctggaatgctccagtttgatctcccttctgccacccctacctcacccctagtcactcatatcggagcctggactggcctccaggatgaggatgggggtggcaatgacaccctgcaggggaaaggactgccccccatgcaccattgcagggaggatgccgccaccatgagctaggtggagtaactggtttttcttgggtggctgatgacatggatgcagcacagactcagccttggcctggagcacatgcttactggtggcctcagtttaccttccccagatcctagattctggatgtgaggaagagatccctcttcagaaggggcctggccttctgagcagcagattagttccaaagcaggtggcccccgaacccaagcctcacttttctgtgccttcctgagggggttgggccggggaggaaacccaaccctctcctgtgtgttctgttatctcttgatgagatcattgcaccatgtcagacttttgtatatgccttgaaaataaatgaaagtgagaatcctctatgagttattgctggggctgcatctgcatctgctgctgacacctggggaagactgggtccccagctggctgccctctgagccctctagccccttgcacctttggcccacatgaccctgccatggtgtgtaagttacctgtcactgtgtaacaaactacttcagagctcagtggcttccaacagcatctgttgtctcccagttccaagtcacgatttgaggcttggcttggtcctccactcagggtttctcacagggctgcagttgtcttggagccgggctgaggaaggatccactcccaaggccgttcctgcagttgttcgcaggattgacttcctcactggctgttgacagaggccactttcagttccttgccacatgggcctttccatggggtagctcacggcacaccagcttacttagcaagaagagccagtgagtggagtgaagtgtgcgagcaagacggaagtcccaggcccttataacctaacctgggaagtgatatcctgtcacttttgccatattctgttcattaaatgaacattgctcggtccagctcccactggacgggaggggattacaccagggaatggatgccagggggcaggggtcattgggagccacttgacatgatgcctaccatgtggtaaagggctcctgtccagctggggggcccttgggtggctgagctggaaggctccttatgggtcactcaagctgtgttccctgcccctggcctcagctctaccaaaaaggcagaggcctggcctgctgtcaccctagcgattacaagatgccacctcttttctaattcctttctgttcagtgagtactaagcacctgggaacccttcctagccgagaccaaaggaccttgttctaacttccttactgccagaactgtcctgcctgtccttgctgttcatccccctcagggccaactcctctgtgccagaaactgtgagagagctacttgggagcagagacaaacattgggaacagctgaagatacgcagggtggccagagctgtgccagaagccccagcctgcccgggggtgcgtcactgaggaaagaacgcctgagctgggccttgaagggcggctgagagtcgccaggaaaggaaggcagtgaagggcagagcagtaggggaaggatagggaggcctgattggaaaaacattgccggtttgaaagatggaggaggcagagacagcagtggggcttagcttggaagggtggggagctggtgtctccagagtttctatgtgggcagaaaggcagagcagtgggaggagtgctgggaggggacaacagaggctggcttctagcgccaggcaggcctcaggctagagtgctcaggtcagaggatagccatttcctttcggatggggtaaaggccttttttctggtgagggtctcagcatcaccccagccccagcctgaggctgacccaaggctggactgcaacctcagtctctggcttcaagtcaagccctggccctaacgaagctactccaccaaggtaggctgttattctcaagcactgctttttgtgaagagtgagcaccttctgtgtactggggaactccgccatctgcctaagaagaacagggacaataactgggtcccaaatctcagacagatgccctcagtggcctgatcagagctgagaccaccctggtcttaagctgtgcatagggcaggggggactctgataggttctgtgaacattgccttgggatgggagttgttaccttgggagaaggaactggaaccgcctttcccccgaagaccacctgcccctgggtgtagtggtgagggcagcactttgagactgaagatggtcagttccatgattctgtctgtggttcccagatacagccacaagggggcactgaagatggctctcaggcataggccacactgcgacttaggcttgctttccacattttcacatctctccagctccttacccaggctaaaagctagggtgtttcacagataaagatatttattaggtcaaattggcttatcacgttgttcaaatatcctctttctttgttggtcttctgcctaattgttctatccattattcagagcagggtattgaattctccaactgttgttattgattgatgtctccctccagttctgtcagttcttgcttcatgtgttttgggactctgccgttacctgcatgcgtgtttataacatgtttatgttatgtcttcctgatgaatccacgctttatcattataaaatgctgctctttgtagtaacagtttctgtctctaagtttactgtgtataacctacattggtacagcgaccccaacactcttttgttcctatttgcatgacatgtcttttctatcctttccctttcaacttatttgtgtctttgaatataaagtgcgttgtagacataatagtgttggatattttttatatccacatttctactctttgccatatgattgtttagtctctttacatttaatataattataaggtgggatttacatctgtcattttgctatttgttttctgtgtgtcttatttttttattcctcactctttccattactgccttcttgtgtgttagacaactgttttctaatatactattttaattatcttcttgtttctgtatatttttgagttattttcttagtggttggttgacactttagtccagattaatacaaattaagattaacatcttaatttctccatcatttggacagggtagcttgagagaaaagaggggcaggccatataagaatggtgtagtgggttgaatagtggcccacacaatatgtccacatcctaattccttgaacctgtgaatgtagtcttatttggaaaaaagggcctttgcagataaaattaagttaaagatttcaagatgaggtaatactgaatatctaggtgggacccaaattcaatgataggtgttcttagaagaacaggccaggcgcagtggctcatcgctacaatcccaacgctttgggaggccgaggcaggagaattgctcaatcccaggagttcgagaccagcctgggcaatgtagtgagaccagcctggccaacatgacaaagccccgtctctactaaaaatacaaaaattagccaggtgtggtggtgcacacctgtagtcccagctacttgggaggctgaggcacaagaattgtttgaatccagctgggcgcagtggcttacgcctgtaatcccagcactttgggaggctgaggtgggcagatcacctaaggtcgagagttccagaccagcctgaccaacatggagaaaccccgtctctactaaaaaatacaaaattagctggggtggtggtgcatgcctgtaatcccagctactcgggaggctgaggcaggagaatcgcttgaacccgcttgaaccttggaggttgcagtgagccaagatcacgccattgcacgccagcctgggcaacgagagcgaaagtccgtctaaaaaagaaaaaaaaaaagaatgtttgaacccgggaggtggaggttgcagtgagtggagattatgccactgcactccagcccgggcaacagagcaatactctgtctcaaaaaaaaaaaaaaaaaaaaaaactagaggcagagattgggagttgtgtaggcataaggcaaggaacacctggagccaccagaatctggaaggggcattgaaggattctctcctcgagccttctaagagagcacagcctttgattttggacttctggactccagaactgtgagagaataaatttctgttttaagccacccagtttgtgtcttaaactaatacagtgactttaatatatttataccacctgatagagaagttggaccagaggatgacaacctctagtcttctcacaaatcaaatatttcacttttgtttccatggggtggactgcaagtttggaagacactcttccctagtacttctgagagggtggaatattttcccatttaaagagttataatgggattatgaggaggagaaaagtggagacttccccgaccccctgcttccaccaccatttttacagcaaacgcatgcttcatatatttatttcaaacttctttttcatattcctgtttcccttccttgcaaactctttttcaaaatattttttaccactttccgtttagggagttttgtttcatatattttcatctaattttttaaatcatacatacacattttatttcttatgttttttatgtatcattaaatcacactaacatacatcttaaaaagtttcttctctgaagtatcaaatgatttttgagatttatatttacttttgatgaaaactaatatgtcaaagtatttttcttctattaaacatgaacagtatatcttttcattcaatgtatatgatataaaaatatattccaagaaagtatgacttcgctatataaatgtattgaaaatatatgcagtaacactatttcattagaggcagtaaaatgtaggattaacaacactggagttagactgctttagaatcccagctcgaaactcagaacatgtgactgccttcactttctaatctcatagcactgttgtgtcgatacacaaaaactgcttgtaacaatgcctggcacaatccaagcactcaataaattattgttttttaaaatctaagctttagggagttgagcctgatctctctctcctgctacagaactccactgtggtagcccctcttgaataaagtctgccctactgttttttttggtttttttttttttgagacagagtttcgctctcgttgcccatgctggagtgcaatggtgtgatcttggctcagcacaacttccacctcccgggttcaagtgattctcctgcttcagcctcccgagtagctaggattacaggcacacgccactacacctggctaattttgtatttttagcagagacagggtttctccatgttggtcaggctggtctcgaactcccaacctcaggcaatctgcctgcctcggcctcccaaagtgctgggattacaggcgtgagccaccgcacctggcccctactgttcttaaataaacaaatgaatctaagctttatgagcaaaatattaggataaaagtaaaataaataattttcattttgtttccgtgaaatagattacaatgaacattacacgatttttaaatatttttttagaaacaatctcataaaaattttcaagtacaatataaataatttttttcctaaattatttgagagtatgttgtggacataactcatcactctcaacaaacaagaatgttattttttttctttttttgagagagggtcttgtgctgtcacccaggctacagtgcaatggcacgatcatagctcactgcagcctccagctcctgggctcaagtgatcctcccagctcagtctcccaagtagctgggattacaggcatgtgccaccacgcctggccaattgttttttatttttcatggagacgacgtctctctctttttttttttttttttttgagacagagtctcgctctgctgcccaggctggagtgcagtggtgcaatctcggctcactgcaagctctgcctcctgtgttcacaccattctcctgcctcagcctcctgagtagctgggactacaggcacccgccaccgtgcccagctaattttttgtatttttagtagagatggggtttcaccatggtctcgatctcctgaccttgtgatccacccgcctcggcctcccaaagtgctgggattacaggcgtgagccagcacgcccggcccgacgtctctctctttctagcgggtcttgaactcctgagctcaagcaatcctcctgccttggcctcccaaagtgctgagattacaggcgtaagctaccatgcatggccaagaatgttatcctatataactacaatgaaaccatgaagaccaagaaattaacgtaaaaacattactacgatctaatcctcaggccctattcaaatttcaccatttgtcttaatagtgtccattctggcaaaaggatcaagttcagagtcacatgttatttcgatcttcttttatctgaaacagatactcagtctttccttgaccatcatgactgacaatcttgaagatgatgagctgggtactcttagaatgccattcagttttgttttgcctattgtttccttatgattggttcaggttatttatctttggcagaaatatcacagatgtgatgatgggctcttctcatcacatcctgtcaggaagcagataatttgaatttgtcatattactgatgatggtcatgttgatcactcttttttttttttttttttttgagacagagtctcgctctatcgcccaggctggagtgcagtggcgcaatctcggctcactgcaaactccgcctcccaggttcacaccattctcctgcctcagccaccagagtagagtagctgggactacaggctcccgccaccacgcctggctaatatttttgtatttttagtagagacggggtttcaccgtgttagccagaatggacacgatctcctgacctcgtgatccgcccgccttggcctcccaaagtgctgggattacaggcgtgagccaccgcgcctggcctcattgatcacttttaagatggtgacttgccacacttttccactgtaaagttactctttttttggtagtttgagactttacaaatatctcctttcttactaaacatttattataaagacttatggaacctattttattcaatgggttataagccattctaacatttattctgatgctcaaactgccccagttttggacagtgagagccccttcgaactggcttctgtgtccctttgatgtcatttgtcccatcatttttctgaggacttccttactttctggcacaactggatgccccagaatcatcttttgctttttttctggcctaatcctggaatcagccacttctccaaagagtcttgattcctcctagtggaggacggtatctacaaaccaagatctggccagttttaatttacggataacagggttcatcctagttcttttccttctcatatttataaccaactagtcctaaatagtgtattctaatgaatgcagaagctatgatgtgggtgacaaagtcctgccctgaggacctgggttcacaccatcaatttgccctaagaaccatgtgacgggtcattttaatttctgatcctttttttaggcatccgtaaaactgagacaataatacccacttgagccaggctcggtggcttatacctgtaatctcagaactttgggaggctgaggtgggtggagcacctgaggtgaggagtttgagaccagcctggccaacatggtaaaaccccatctctacaaaaattacctgagcatggtggctaacacctgtagtcccagcttcttgggaaggagaattgcttgaacttgggaggtggaggttgcagtgagccgagatcgtgccactgcactccagcctgggtgaaagagtgagactctgtctcaaaaaataaaataaaacaaataaataatacctacttcacaggatcctgtggggattgaccagagtaataatgtatgtaaaacacttagcaaatgttagttccctctaggtcctagggaaacctgcagactcatagaggggaattgatttgtctaaaatcatgcaatgaataagctaaaggttcagactggtctccagatgcttacccctggcatggagtctttcagcaacactgctttgcatccagggtgtaccttctcagaaactctgtgatgctatgcctgcctggggagtggctcaccagtcaaagaatcagcctaacagggaaatcagacgtcccttgagtgcctttattaccaggaactcagcacatttttgtcctaactgtcctcaaactcaatgaagaaatgtcacaatttatcatcaccattttcactgctttgcccacccccgaatctactcaacacagcagccagagtgacatttctgaagcataaatgagagcatgtaactcccctgcttaaaccccttaatagttgtccatgagcctcaaagaaatccaaactccactgtggcctacaatgcctggcaggacctggccctgccagcatctccagcctcattctatgccgtcagggctggattaggacttcagaagctctaagcaccaaaggatagtgctgcttctactatataaaattacaaataagggccaggtgcagtgacgcacacctgtaatctcagcatttgggaaggccaaggcagacagatcacttgagcccaggagttcgagaccaacctgggtaacatagcaaaagccatctctacaaacaatacaaaaattagccaggtgtggcaatgcgctgtagtctcagctatttgggaggatcgactgagcctgggaggaggttgaggctgcagtgaatcatgatcacaccactgtactcaagactgggtgacagagcaagaccctgtctcaaaaataaataaataaataagtaaataaaattaccagtaagaacaacactaaactgttaaagaaactgaaggtggtctttggtttggttttggttttgaaataccaatttctttcgaaagtgttctcctcttcctccttggcaccagctggccttctctttgagttgctgcaatgctccatatagtccttcatgggctgttcctcctgttcctttatccaacagcttcccctgccctcactagcctcctttgtccagttaactcctactcatctttcagacctcactgcaaacatcagttcccaaggaaagttttctctggacaactctcggtatatcagctccctgggttagatgtgcttatttcccatacgtgttaccctcactggcctgcacattcacaagctcctgtgttcacactggcacctttacagtcagtggcagtgggaaaaccactggaactgaggaaagagcattggtcttggggacaaaaggcccaactctttgtcttagctttgctacaaactttgtgtgaccttagcaagctcatttcccctctctgggggctgtgtctagtcgggaggaatggaggcccccatgtgatccaaacattcacttactcaagtatttgtccattcattcattgacttcattcattcagccatttgctcaatgacgctatggagcctgtcttctgtgttgggatgctggggactcagagaaatcaaaagcagaggttcacagcagagtgggagggacaaatgtagactgctcaatatatgactaggcacacagttacacatactgaagagaggtcagacagctgctgtaggagcccagaggaagtagcagttcgttcagacctgggaagccttttttgagaaaatgaccttgccgagttgggaaaggagaagggaaaatgctgtctaggcacctgcctttcagggttcttgggtatgtgcagtttctttggggaatggcctttttcttttacaattctcacctgctttctgcaagcgtctcactcttctagtcctgccccttcaaagctacccctcccccaaggctgcctgagccatctttctaagtgctttctgttgcccacgatgaaactcatgttcttcggcctggtagtcaggttcttctcacccggccctagcttcctcttccaatctttttgcctgttgctctcccatgcagcctttgtttcagccatgttagactctgctgctgtcacttcctctacccctgtgcctttgctcatgctgttcctcctgcatagaatactctcctctcctaggaagccttcctggacaacacgtgacagttagcacctttctcttagtgcttccactgtactttatacatcatctcgattattgtacttaccactttgtaccaaatgagctgcgatctcctttcagttagggattctatgtgcatcattttctgaaacgtagtgcccaggctggacacctggcaaaggtctgatggg

SEQ ID NO: 631 - DNA, 2449 bp, Homo sapiens
ctgccccgttgtgaggtgataaagtgttgcgctccgggacgccagcgccgcggctgccgcctctgctggggtctaggctgtttctctcgcgccaccactggccgccggccgcagctccaggtgtcctagccgcccagcctcgacgccgtcccgggacccctgtgctctgcgcgaagccctggccccgggggccggggcatgggccaggggcgcggggtgaagcggcttcccgcggggccgtgactgggcgggcttcagccatgaagaccctcatagccgcctactccggggtcctgcgcggcgagcgtcaggccgaggctgaccggagccagcgctctcacggaggacctgcgctgtcgcgcgaggggtctgggagatggggcactggatccagcatcctctccgccctccaggacctcttctctgtcacctggctcaataggtccaaggtggaaaagcagctacaggtcatctcagtgctccagtgggtcctgtccttccttgtactgggagtggcctgcagtgccatcctcatgtacatattctgcactgattgctggctcatcgctgtgctctacttcacttggctggtgtttgactggaacacacccaagaaaggtggcaggaggtcacagtgggtccgaaactgggctgtgtggcgctactttcgagactactttcccatccagctggtgaagacacacaacctgctgaccaccaggaactatatctttggataccacccccatggtatcatgggcctgggtgccttctgcaacttcagcacagaggccacagaagtgagcaagaagttcccaggcatacggccttacctggctacactggcaggcaacttccgaatgcctgtgttgagggagtacctgatgtctggaggtatctgccctgtcagccgggacaccatagactatttgctttcaaagaatgggagtggcaatgctatcatcatcgtggtcgggggtgcggctgagtctctgagctccatgcctggcaagaatgcagtcaccctgcggaaccgcaagggctttgtgaaactggccctgcgtcatggagctgacctggttcccatctactcctttggagagaatgaagtgtacaagcaggtgatcttcgaggagggctcctggggccgatgggtccagaagaagttccagaaatacattggtttcgccccatgcatcttccatggtcgaggcctcttctcctccgacacctgggggctggtgccctactccaagcccatcaccactgttgtgggagagcccatcaccatccccaagctggagcacccaacccagcaagacatcgacctgtaccacaccatgtacatggaggccctggtgaagctcttcgacaagcacaagaccaagttcggcctcccggagactgaggtcctggaggtgaactgagccagccttcggggccaattccctggaggaaccagctgcaaatcacttttttgctctgtaaatttggaagtgtcatgggtgtctgtgggttatttaaaagaaattataacaattttgctaaaccattacaatgttaggtcttttttaagaaggaaaaagtcagtatttcaagttctttcacttccagcttgccctgttctaggtggtggctaaatctgggcctaatctgggtggctcagctaacctctcttcttcccttcctgaagtgacaaaggaaactcagtcttcttggggaagaaggattgccattagtgacttggaccagttagatgattcactttttgcccctagggatgagaggcgaaagccacttctcatacaagcccctttattgccactaccccacgctcgtctagtcctgaaactgcaggaccagtttctctgccaaggggaggagttggagagcacagttgccccgttgtgtgagggcagtagtaggcatctggaatgctccagtttgatctcccttctgccacccctacctcacccctagtcactcatatcggagcctggactggcctccaggatgaggatgggggtggcaatgacaccctgcaggggaaaggactgccccccatgcaccattgcagggaggatgccgccaccatgagctaggtggagtaactggtttttcttgggtggctgatgacatggatgcagcacagactcagccttggcctggagcacatgcttactggtggcctcagtttaccttccccagatcctagattctggatgtgaggaagagatccctcttcagaaggggcctggccttctgagcagcagattagttccaaagcaggtggcccccgaacccaagcctcacttttctgtgccttcctgagggggttgggccggggaggaaacccaaccctctcctgtgtgttctgttatctcttgatgagatcattgcaccatgtcagacttttgtatatgccttgaaaataaatgaaagtgagaat

SEQ ID NO: 632 - protein, 388 aa, Homo sapiens
MKTLIAAYSGVLRGERQAEADRSQRSHGGPALSREGSGRWGTGSSILSALQDLFSVTWLNRSKVEKQLQVISVLQWVLSFLVLGVACSAILMYIFCTDCWLIAVLYFTWLVFDWNTPKKGGRRSQWVRNWAVWRYFRDYFPIQLVKTHNLLTTRNYIFGYHPHGIMGLGAFCNFSTEATEVSKKFPGIRPYLATLAGNFRMPVLREYLMSGGICPVSRDTIDYLLSKNGSGNAIIIVVGGAAESLSSMPGKNAVTLRNRKGFVKLALRHGADLVPIYSFGENEVYKQVIFEEGSWGRWVQKKFQKYIGFAPCIFHGRGLFSSDTWGLVPYSKPITTVVGEPITIPKLEHPTQQDIDLYHTMYMEALVKLFDKHKTKFGLPETEVLEVN

SEQ ID NO: 633 - DNA, 21437 bp, Mus musculus
tcttcccagaggtgaaggtgggatgaagccaggaagggaaggttctccagccccacctgctgttgctgagcagggcccacaccttctactgtcgggagactgaacagagatataccctgaggggctttggagagaatggctgtaggcttaggagttcccttttctccactctccctttctgggcttctttcttccacttaacaccctttcccagagggctgccttagctggctgtagtttggacaaaagtattctgtgtccttgcagcttgccagtgtcagacaccctagtgcagaacccacagaaaagacactgcactgtcccttaacagggccaccttcttctttctttctttcttctgctcaggtctaggagggccccaggaaggagtggtggatactcttagtgtccctcatgggtcccaaatgagtgcatacatagacagtccagagtcaaaaagagcaacacctggagctcgtggtccatccttcaatgcctgaggagaggggaggtctttgtctgcactgtcaaaatattaaaacaggcccctacggctggagagatggctccgcagttaagagcactaactgctcttccggaggtcctgagttcaattcccagcaaccacatggtggctcacaaccatctgtaatgggatcagattccctcttctggtgtgtctgaagacagcaacagtggattcacatacattaaaataaatacataaatattttaaaaaatactgattaaaaaaaaaaaaaacaggcccctagggtctctgttcagggacattagttagttaaagaagcagcgctaaagcagagggctagtgcataacacaagaagcgtggggttccacccccagaaccacaaaaatgggattggaggtttgtgcctgtcatcccaatactcagaaggcagaggcaggccttcaggagttcaaggctagcctggtctacgtagtgagactcagtcaatagaaagatagataggtagacagatagacagatagatagatggtagagagatagatagatgatatagatagatagatgatagatggtaaatagataggtgagatagatagatagatagatagatagatagatagatagatagatagatgatagtagatagacaggtgatagtagatagatgcagatgagatagacagatagatagatagatagatagatagatagatgatagtagatagatagatagatagatagatagatagatagatagatagacagacagacagacagacagacagatagatatagttagatgggtagatagggagagagagagagagagagagagagagagatggatggtggatgggctggcaaatggctcagcctgtaaatgccctctccatcaggcctgatcccttaagcccacctggtttttcttggtagaaagcaaaaactgactcccacaagctgtcctctgacctccacataagtaccatagtatgtatgtgtcttactaaatacaaattctgcagtcaaacttggtgactcgtgcctttaatcccagcactcagaaggccaagctctgtgagttcaaggtcagtctggtctacagagcaggctcctaggacagccagagctacacagcaaggccctgtgtcaaacaaacaaaagagaaaagttctagagaggtgggctttgtcattaagagcacttattactcttgcagaagactggggttcaattcccaccacccacagggtggctccataaccatctgtaactccagtctcagggactccaaggccctcttttggcttgcaagggcttgcacacacacagcgcatacatgcagacagacccacagatacaatgctaatgctgtctgctcagcatctataaatgaggtgctctgttctggaaatcactgcatcaaattccatccctactgtgaagttatggaaaaattatcttctacagtttcagtatttgggttgtgctagatgttataaagtttgtagtaatttatactaaaacttggatttcaactttggatggtgcaagggaggcctggaatgatgggaggctgaggcaggagaattgctatgcgttctgggccagtttgaatatctatctaagactctgactcagaaaaagaaaggaagggcaggaggttaggaggagccactgagtcacgtgagtcaggtctccatctgatggggccaacctgtctcatgacacatttcccaaaccctacctgagaatgatttatagctccaactttacagtaaaccagtggggctcagagagaacaaatgacttccccaaagccacacagcccatcagggaaggatggggctcagctcatctgcacagtctctgctctggaacctgagaatgctcctctaggctggggaagaagtcatgccagccaggaaaatttgcaggattttgtttctgtccttcttccttccccatttaaggaagaaaaaggcaaaagaaccacgcatggcaggatgtcactcctagccagagccctgtctggaaccttccttgggctccagggctggggtcagggtacacagtgatcaagtctgacctttaaaatgaccttttctcatccctccgaggtctcccaaggctgtgagcaaaggagtgggtgggtcctcactcctacctgccctgccccacgcccttacacacacatgccaaaatcccatcttcccctgatcctgtgcccatagcatgaacagtctctttgggtctccaggagaaactaagggcctcaattataggcttgtggggagaaactagagagggagaaaccacccctacactgtgctgctccctgtcttcctagtacagcccctctatcactgagaccaagctgaggacttgagttctgaaggcatttccaggcacattcatgtggtaaatggagaccaggaattcaggttttatatcccctttggaaagactacacatccacactcctcactggcccttcccaatacctccacatctgccctgggacaccccactcctcacagggctccccacatctgccctgggacaccccactcctcacagggctccccacatctgccctggcacccctccatttttcaggcacctgaagtccctactttctaaaggccattcttctacctcaggtcttgctctaggactgtcaacatggatactctgtagtaaagacttgtcccttccaggacagccagggctatacagagaaaccctgccttgaaagaaaaaaaaagaaagaaagaaagaaagaaaaaagaaagacttgttccattgatggcgatggcctctgggcaaaagatctcagctttgcttaccactattctctgagaatggaggtggggagaaggacaccccctttccagctttggggagtctctcctggccttggggtctttgatttgcctaaggatggggggaaggactgggtgtcacatctgtggcccatgagtgaggtggtggctcctggtggtcttgtcacctcatgggacttaacccccttcaggcctgtacaatgttcatgtagcagacacggtttcaggtcattagtgcaggaggagaaactgaggcaaggacagactggcttggagcctgccttaggcacccaaaggcagaattgaatcccgtgctgttactactagctagctctttgacctgtgaccttgagctagccgtcaagtgctgtgcactgaagtaaacaaactctcccctgccatgaataacaggacacctgacagagcttggccaggcaaaggcagtgacaagcctagctaagttacccacacctagcccaatgaatttacctggaaagagagctttagagttccagtcacctggtcctcagcaactgggaaaggttctgagtctgtacagtgtctggttctgaattcttctgtgtcccccaggcacaccagaaggtagatcagaacccagagagtcagagggccaagaaactgctgctaaaccgccaggcagtcggcctgggcaggcaggtgagaagagtgtggaacatgtggcctggaccacatgtacaggcagggtgtgcctgcatccctggtatcctgccttttctagaaccaagcacagagggacccatttaggtcttagagaaatctgcaaacagacaggttcaacatcatcatctgacaggtgagcaagctgaggtcctcctctccgatgccatgggcttccagcatgatccacacacctacgcctaggggattctgcttccctgagccacagtcacaggagctgctatggtcgttccctagtggggaccagcactaggacaaaacatggcaaagaaacagaaggccatttctgggtacgagaactccataaacagcaaacctttaatcccagcactcaggaggcagaggcaggcagatctcatgagtttaaggacaacctggtctacagagctagttctaggacagccagagctacacagaaaaaccctgtctagaaaaggaggaggaggaagaccttcataagcataggagtgtgattgccaagaaacaatagttattttatttatagacagagttttgtgtaacccaagttggcttcaagctctgtatgtaaggagggatagcattgaacttcaaatcctccggcctccacctcctaaattctgtaatggtagcttagcaccaccacacccaacttaatatattgctggggattgaagcctgggcctcctgagtgctaagtgaacattcttccaacagccccaaccccaagatacctttttataaatgtccttagccaggttaggtgatgggggtgggggtagggtggcggtggaggcgcacacctttattcccagcactcaggaggcagaggcaggtgcatcttggaaatttgaggccagcctagtctaggacagccagctaagactacacaaaaaccctgcctcgaaaagctaaaaaaacaccaaaacaaaacaaaacccaaacttttccaagctcaggggctcccctgtgattctgccccttcaggttgagctgcaggggatggagtccatccatggcagcctgttctacattgggactgtgagcgactggagggctacagagatggcagggtggggaagaacacttgctgccaagcctgacaacctgagtccaatccctggaaccaaagccagcttccagaaagaagagaacttactctggcagaaaaggaccagggttcatttccctgcgcccacgtggcagttttataactatccgtaacttcagttccagggggaggatctgacacccccttcagccctccatggatattacctgcatgtagcacacagacacgcaaacatacgagcaaaaattcattcacattaaataaaaataaatcttttttttttaatctgaaatggcctggagctgttgctcagtggggattggcctcacagtatgacatcatggtccaatccccagtacctccaagtggaaggacagcagtgtcccctaaaacttcattgtagaattaccacgtaccccagcattcccaggaagggctgaaagagctcagataagcaaggacacataggtggtggggttggggggagcacggtggggggatgggagggtagtgtgtcacagcagctccaagagaggagcctgagggttcacagacaaaccaaggggccaccaaaaatgtgccaggctgagtggtagaatattattcagtcttcaaaaagaagggaattcagacacacacctcacctgtgcctgttgaataaattgaattccaagccgtgagccagccctggcacaaagggccacacactgctaggctgatccctcgagtccctagagccctaagctctaccggatgtggctcaaaggggtgggggttggttgggggggagaatgagtcagcatttgaggggaacacagtttcagtctggggagatgagcacattctgagactagatggaggtgcccgcacctcagtactgggcgtgtttgggtcgaagtcagttctctccttccaccatgtgcgttcctgggcttgaagtcaggattgaggtcctcagtgtgtcttatccagagggcaatcctttttatttgttatttttgacagggttgagacagggtctccctatgtagccttgggtagcctgaaactctaggctagcctcaccagagatctacctgcctcagcctcctgaattctaggattaaaggcgaataccaccaattgaggccgaatttgttttttgttttgttttaatgttaaaatattagctgatctccctctcagtttggaggcctgaagagacgtgtcagctctgaagctctctgcagacccacctgccaggccttccccctcccccacccccacctgactgcataatgactttgctgaggctagaagaaggatttaaactgggaatttgtaaagtttaccctgggccctgcccagaggagagcctcctccccccccctcccgcccagaacccaatttttatgcactcctattcttatgacgatgaagctactgaacttacttaacagctaagctggctaccaggagaagtcctgttcctagggagaagtagttattcaagggaatggctctgggactttgtaaggaataggtcatgcaaggtcacactctgagggctagcctgggctggactgcaggctgaaaggtgtcccgccatgggctcacctgccagtctccactcacagcccattggaggatgatttttgtgaatgctctccacagaccttggctattcctcagagaccagcccttgctctcagccaggcccaatctgaggaacctaccatcagacttttctcagtctcttctcaaaggcccccttctgcctttgctggcaccatttggttctcaactctctttgttgctaagggtaaccttgaatttttgatccttctcttgcttctgcatccctcccgccgggattgtaggtgtgcactaccatgcctgggttattcagggctggggataaaacctgggacatcacgtgtggcagacaagcacactaccaaatgagtcgcatccacaacccacaatggccaccgtttcttgtgctcattttgtagactgggacatggagaaccatccacaagtgaaaggtcacatgcaacaacaggctggtggctggacttgaacccagagctggtggttgcaggacttcccaagttcataatagactagacattcaggggtgtgtggcagggcaggaggttgcccaggaccccaactcagataagccaaagtcacaatatcccatcctatctctcccaggcacttaaagcttcagcccctagcctgaagtcatcagcaaacttgctccaggcaagccagtcttagccagtagccactggtccacaagcatcatttaacacttactgtgttccaagccctggaggcaagaactgagaaagacccagatctgtgatcgcactgtgatggtgacaatttcagcagggggaggggcagataataaatggagccttgttttattgttttggtctgtgtagccctggctatcctggaactgaatctgtagaccaggctggacttgaactcagagatcctcctatccttgcttccagagtattgggattagtatgccaccatggcctggcaaatgaagacttttgtttgggttgtttttctttctttctttctctctttctttctttctttctttctttctttctttctttctttttttttttttttttttttttttttttggggtttttgagacaagagtttctagaccaggctggccttgaactcagaaatccgcctccctctgcctcccaagtgctgggattaaaggtgtgcgccaccactgcccggcgttgttgtttttcattttgagacaggatcttattttgtagcccaggctgacttggaactcaggccagcctcaaattcagagatacacctgcctctgcctccttagtgatgggattaaaggcgtgtgccaccactgcccagccacaataagatcctttaaaggtgtgaattggctgcaagtggagtgagtgaaggctcacaggcttggggagactgaggtcctagggcagcctaaggtggaggagtcctgggccaaaagatctctggatcttccctgcagggaaagggctggaaactggacaggcatgaggtcggggtctggtggcagagtggggttagtcccggagagccctatcctcacccgtgctctcatattctccccaacacttctgaacttggaggagccggaagctggaggttctggagccacagcctggagcaaaaagcaggccccaaagcagtttgatgatagtgcccaaccttggtcctcctgactactaaccactgtcaagagcacccacagggtgtggtggccagcagctccttctgcagtcacagagtcagggatgcactcccaaattgagttggggtggggggacctgcctaccaccagagcaatgatctagatctgatccagcctgggcccagccccagaaaggaacacccaggagtgcccagactaaggactgcagccctcctccagtgacacagcaggggatctagggaaccctgttacaggaagggatgtttctcagcagggtgtgtgtatgcatgcttatgtgtgtacatccatgagtgtgtgtgtgtgtgtgtgtgtgtgtgcgcgcgcacacgtgttcgtgggagcctgtgcacagctgactttgctccctagcaagcaaggccagcagcagctctacctgccactggaggatgcggttatcccaggctgccaggtgcatcagaatgcctcattaagggatttggagacatggtgtaatccccactaagggatagatagatgctcaagtgtctcctctaggtctcaggacctggctgcatttccgttggtgttctgagtaggaccaggaatgattggtgcaagcccaatgacagaggtttggcagaaggaagccacagctcccagaagctctggtccaaattactgattcctcggtgagggggtgcagcaggctcttcggctcctccatcagtggccaggtcacctgctggctccaggttcctcagataccacagaacagggacattcacacctaggagaacagtaccagggttctgcccagttcacccccatcaggccagaatggccacagttgggtgtgggggtgctggtgggggaagggacccttccagatccttagagtttgacatgctcctgggttgggaagttctggcctccacacttgaaaatctctggggaactgatgcccaatgtcttgccagctttctgtccttgccttgggttacctaggaggaaagtgcgggtctctgctgtccctgaatgtcctcaacctgagttctcttagaagcacccactccgtagtttagacttcccatcacctggaagacccttaaatttccaagcctctggggccagaccaagccttgcctccctccctccgatcgtgccctacctcccggctcccttagagttacaccctgatagccaagccacagtgtgacttgcctcccaccgtcagctcaagccagtccttggcgcagcagaaaggttctggcggttcaccaagtgtcccgcaaggaaggagcacaggagatgccctggggagcagagagccaaggggcgggatcaacaggttcgagtgcggggcggagccaagagtaaggggttggggtctctccaggtgacagtagccaccgccaggcccgcgcctcctcccccggcggtgattggcaggcggcctgcgccccggctcccaggcgaccgacgccccgcggggcaggcgagtaggagggggcgccggctatatataccactgctccggagggctgggcgcgcggggactatcccgccaccgttgcgtccctatttgctctcgctacttaggtctgtgcgcagcactcaccgaactcacggcccgcagctcgaactcacgcacggcccgcgggccgggatggcgaaacgcgggccgaccacagggacgctgctgcccagggtcctgctggccctggtggtggccctggcggaccgagggaccgccgcacccaacggcacgcggcacgcagaattggggcacggctgggacggcttggtggcccgctcgctggcacgcctgccggtggccgcgcagcccccgcaggcggcggtccgcagcggcgcaggggactacctgctgggcctcaaaaggcttcggcggctctactgcaacgtgggcatcggattccacctgcaggtgctgcccgacggccgcatcggtggtgtgcacgcagacacgagggacagtgagttctgggcgcgccgaggggatagggtcccgggcagtagtagtctcgggggctgagtagagtcgagctcccaccccttgggctccaggactgagagcgcacccggcggccgagccccgcctcccgccttcggaagcctggtctctcggtgcggaattccatcgccttcacccgcccgcacccacgggagcccgggacaagcgcccagactgaggctggacttgagggccaccggtagacaggagatgagctcttaaagcttgctttggggaccctgggcttttcaccccagcatcgagatcccaagaggcttagagtcggagggtctgtgtgggtccagggtcacctaggcttttctgacctgcgatccctcccccccaacccccgcctccccaggtcttctggagctctctccggtgcagcgaggcgtggtgagcatcttcggagtggccagccggttcttcgtggctatgagcagcaggggcaagctcttcggtgtggtgagtgccagcgggtctggctgggccacctgctcgatacagtgagcaagactagcgggattgtaaacccttcaccccacacatacacttgtgtgttggtcacagaggactggcagtaggattgccaggtctcacgttttcagtcaaagtagccagagccaggctgggtttctagaccaagggaactaccccatccaatttcctcctgagtgaggtacttactgattggggcgggtggggcgggaagagggggactccagcaggagatattaagttgataggggcaaagcaggtgagctagctatgcctagcgtggacttatcacctcttcgaaatctgggacagttttgacactccgcctacctaagaaagatctcttgggtcccgattgcggcaggtccctggctcacccagtaccctctttcccagcctttctttaccgacgagtgtaaattcaaagaaatacttctgcccaacaactacaacgcctacgaatcctacgcgtaccccggtatgttcatggccctcagtaagaacgggcggaccaagaaggggaaccgagtgtcgcctaccatgaaggtaacccacttccttcctagactgtgaccctccggagccctgcctcagcctcggaagcacaccctacccctcaggaggagcactttctctcgatggagaattgtttgcaaaaaaactggtctaagatatttaaattatttaaatatgtatatatggacgcccaattatttataattttatgtattctcattttcggggggggggatatgaccaaaagaacaaacaaattgcagctcagacctctttggaatagcggaacagacttctttcttcactatcaaagataagggtgtgatgctgtttcatgtgtgcctctaaaacttggtgacatcagtttccaagggtgcctggcctgtaactggaaaggcctgcctgggacctctgaggcagtgagaaggaccctgagcgttcccgatcgggagcattctgccgtcgccgctccctctgcttcctttggtatgaaccctgtcggatcggtttactccagggacagaagtcctcccgcctctgtttttagatctccaagactgatctttgaactctcttgcagtcaatcatcttcttggacctaccggataggagacccttagacaactttataaactcctgtttgccatttttggactggccaacagggcacgttgcttgtagccactggaactttgcttttctggagaggaactaggaatggacaagagggtgtgtgcgctcgccacaactcaaaactctggggatgaaattctgttttgtgatagaggatgatttgttgggatataacaatgtattttgcaagaatcaaactgagaaaaacaggcttccctgaatatgggaagctttgtgctggaactccataatttaagggtgagctgccctttcccaccccaggcagcctttatgcaggcagactgcaggagtccgaattccggtgctgccccaaggtgaaggaattctatccccatctacctcagagttcctgagaccctggtgactaagctggaggctctgctgggtgcatctgcctgcttctcttccacatgtagtatctggacccttgtcacgttccagctatctttacccaatgatttacttttagtaaggggtattcatggtgaaaatatgcacgaccagctgtcggagtgcactatatggtcaccaagtcaagtaacccttatatttttctttatatattttacgaatgtaacccctgtcactgagaccaaaatggaagagcagggtcggtggcatttaaaaaaaagggctgaggtgagggagaacaattaattttaatgaatgactttggagtttatacaaaatgaccttagctcgcttcagggaatgcttctccccaagatgttaagactctgctgggagacttctgagccacctcccgaattaactttatgggaggctacagacagcaagactggaaaatctgattggcatttttttttttttgtctttcacattcctttagaaaactctttgtttggatgctaatggatacttaaaatactattctgtaccacagcccaagatggaagaagccacgccccaaagctgaggtgggagctcctcccaaacttcctttctgtctggtggctcacaggacaataagattttgtgttttttaaatccaggccctaggctccaagagtgttggggagaagacagttgaaatgtcttttcttcttgttattttctaaaagacggtctcatagcccaggctgtacctgaacttgctatgtcactaaagatgaccttgaatttctgatcctcttgccccatttcctagtgctaaggttacaggcattgcccaccacgcccactccttaggtgctgggaattgaaatcaagtgcctgccaggccactccacagagataggcctccctcttttttgtgggggaggaaatgtggggtcttactctgtagccaaggctggcctactgcttgagcccaagtgttgagactacaggtagaaggcacctgccctgttctgatgggattctctgcagctatgttgcttcaggcaggctgtggtcctacctgacacctattacctgtttcttcagccagctagctccctttcctgcgcccagggacaagactgtatctttggaattttgttaccagaatgggtttgatgtttctgctctgtatctgccactgttaccgagtcggtctgtagttactacaggtgtcgacccagagatagtatgtgctatgcacactggatgctccatccaaagagaagcattcaatcatgtatagacagccccatggactgatgggaatgattgggagagatattaaaatgacaaacgtgtctgcaagcacctgtgtctgctttgtcttttttctatttgcagctgagcagagtgggagcaaggaaactagttttagccagctgtgtgcacacacaaatgtggcttggaaaatagtcccagaggcaaaggtatatcacaaagttttaccgcatcctgtgtctcccttcagtggggttctgtggctgcccactcagtcactaacccgggtgtaagggtctgtgtccacacggtgaatacttaccccatgaagcacaatgaggcagaagctggccaggaggagcacagtcaacacatatgtttgacttcagccaactgctctcagtgaagatatgaaatcatataagtcatcaaagataccagatcacaggttgattattttataaagtttctgtccctgcttcatcctcttaaactcttaagattatgggtttgtactactacatctggttgaaatttggtcttaattgttcttatatatttatagcttgtatgagaatgtgtttagatttttgggtttgttttgccctttgcttttaagatggaattctagcccactagagtatgagacactatcttttaccccaagtagtaggcttctggtgatgaaacacctttatcttcagcactcgggcaggaggatctctgagtttgagaccagcctggtctatagaatgagttagttccagggctaattcagagaaatcctgtcttaggggggaaaaaaaaccaagaagcaagtaggggttagagatgtggctcaggaggcaccaagcacttgcccagcaaacaggagccttgccttgggttccagcatcccataaacaggctgtggcatacctgtaatcccagcatctgggaggcaaaagcagaggatcctgaattcaaggggaccctccaatacattgtgagtttggggccagcaaggaactagggcaagccacttatgacatatccccatgcaaaggaggccaggcataggtcagactccactcaatccacctggcccatttagacttccagccttcaggttaactccacacacccaggccttaagccactcaattatagtaccccaagggactggtacaggagtctgttagtcatagatggtcagaggcaactagaatcttgagcatccacctgttctgttggctcttgggctcctcagcaaagttgttctagccaaagtaaccatcgttagcttactgatgcttttgaattggtcatctccagcacagaaagattgtgagagagtgtgtgtgttgccggggtgtgtgtgtgggggggggtcctctgtggctggcattgagtagggttgagtgtgtctttgttttgttttagttttgaagtttttcttgcatttttttattgtgtatgggcttcaggataggacatatgcacagagagaacaacttagaagtcagttcttggtcaggcatggtagaacactttaaataccagcactcaaaggcaggtgggtctctgagtttgaggctagctcaatccacatattgaaatttcaggccagccaaataagaccccatcttttgtttttcctgtctatcactctccagtcatatggcaggtttggcagttgcctttgtccactaagccatttctctggccctggtttaagggtttgggttcttttcagtttgttgttttgttcaagataggatctcactatatagaccaggctagcctcaaacttccagagatcttgcctgcctctgtctcctgaaggtcaggattcaagacatgcaccaccacacctggtgatttggggtttttaatttactgggagagcttgcacacagtccccactaccacaggtccagtttctcacatttggggaaattgctcaggtcagtacatctggtgtgcagtggatgagcctggggcttcctcaactccctttcttcagggaaaactttctagtgttagagttacagtagccaaatagagattttctcctggtgacaatggctgtaagagaagccagaaggcatactaaactgtaagccacctgaagctgccccaagtgataacatgccactacccagtcaaggccacctgagccagactgagtgcacaaaggtcgcttaagtggtgggtgggagagatgcaccacagggcgtggtcagccaaggttatttccactttcacctccctaagtggtgtggcattcatctctggaggagtctggaaagcgtgtaactcacctggcaggtggcctcactcctttaaaggaccacttgtagcatgtaaaacagtcaggggccctgcgtcattggccaagcccagagcatcccgtcctggacagtctgtatgcatgtgccccacacttgctgagtccttccatgttaggcacagctctgtcagctgtccccttcgactttcctcttgctgagaggaatgtgtgcccctctgcttcatcattggcagaaacgtctctatgtgacttctgaggcaggctaccctcagtgttctgagctactacagggttgggcggcagaggtcctgtgtctgttgtcccaggaggaagcagatccggtgcgggctccggaggtgagtgctctcttaagagcccttattgagctggagttttacatgaagacagcctggctttcaatcaggctaggtcttaaaaactaaacaaaccagaaatccagcagtggggaagtagaggcaggaggctcttgatctcaaggtcaacttcccatacagtgagtgggtagccagccagggatcgtcaggtggtaggggcaggcagatggggattcaaggtcacccaaagctacctagtaagcttaaggccagcctgggctacttgagaccttatatcaaaaaccaaaaaaaaaaaaaaaaaaaaaaaaaaaaaagcagggcagtggtggcacacacctttaatcccagcacttgggaggcagaggcaggtggatttctgagttcaagaccagcctggtctacagctggaactacaaaaaaaaaaaaaaaaaggaacttttagagttagaggctgtaccatgggagtctttctggctttggtgcctgcttagctattgtgtgttagcccaatgctaatactggttgttctagggaggatggaccatgcagggtcttctggcagaagcagactctattgctgtgattaaacactctgagcaaaggcagctcaggaaaggaaagggtttattctgcttccaaatccaaatccaaatctgattcctgagagaagagagaagtcaggaactcgaggcacaagcttgaaggcaagccatcttgctttcccacacagcattacctccaaaaaagacaactcacacacagccaaggacacgcagcagctttcttacacagcccaggatcaccaggccctgtggtgcactcctttaatcccggcattaggaatgcagaggcaggtagatcactgaattccaggagacccaggactatataatgagaccttgtttcaaaaataagcaaacaaaaaaacaaaaacaacaaacaaaaattacccaggatcacctgcccagggaatggggccacctacagtggtctgggatcccccacattaattaacaatcaagacagtcccctacagacatggctacatgccatgatgcacttagcaattcctcaattgagactcaagtgagcctaggctgtgacaaaatgactgttaaaactaagacagggccgggtggtggtggtgcacgcctttaatctcagcacttgggaagtagaggcaggcggatttctgagttcaaggccagcctggtctactaagtgagttctaggacagccagggctatacagagaaaccctgtctcaaaaaaacaaaaaacaacctaagacaggctccaactcagaagagagcttctatcatactaggccaacaccctgcactgaggtgttgtacttactgtacttacactttcactttttttttttttttttttggtttttcaagacagagtttctctgtgtagccctggctgtcctggaacccactctgtagaccaggctggccttgaactcagaaatccgcctgcctctgcctcccaagtgctgggattaaaggcgtgagccaccaccgcccggctgtacttacacttttaagtcactacattttcttcattaattgagtattgcttaactaattagctgactaactgattttgagacaggacctcagtctgtagccatggctgatgtgtaactcactgtgtataccaggctggcctagcaaatcacagagatgagtgctgggattaaaggtgtgagctaccacaccaggctagattttttttcaaagatttatttattattatatgcaagtacactgtagctgtcttcagacacaccagaagagggtgtcagatctcattacaggtgattgtgagccaccatgtggttgctgggatttaactcagaacctttggaagagcagtcagtgctcttatctgctgagccatctctccagccctagatttaaaaaaaaataatgtatatgtgtgcataagtattggaagcagtaggatcagaaattcaatgtcatctttaactagaaattgaatagcttgggctacatgagatcttgtctcaaaaaaacgagagaaggagaggagacaggagtagtgatttgcattttttccccagacagggtttctctgtatagacctggctgtcctggaactcactttgtagaccaggctggctttgaactcagaaatctgcctgcctctgcctcccgagtactgggattaaaggcatgcgccaccactgcctgggttgtgatttgcatctttaatcccataacatggtaaacagaatcaaaaagatctctgtgagtttgagtcaactctgttctatatggtgggttgcaggcccagcccaggctatatagtgtgaccctgtctcaaagaaaaataaaatagggaaaagaaaagaaaagaaaagaaaagaagagaagagaagagaagagaagagaagagaagagaagagaagagaaaagaaagaaagaaagaaagaaaagaaagaaagaaagaaagaaagaaagacaagaaaagaaaagaaaagaaaaggaagggctggcgagatggctcagtgggtaagagcacccgactgctcttccgaaggtccagatttcaagtcccagcaaccacatggtggctcacaaccatccgtaacgagatctgactccctcttctggagtgtctgaagacagctacagtgtacttacatataatcaataaattaatctttaaaaaaagaaaagaaaaagaaaagaaaaggaagattcaggcttctatggcagtgctccacaggcagtgtttttgatagccatcatccactgtaccgttacctcaggctggaaattcacagctgagttacctactttggggctgtgtcttcactccacaggtcccagactgcattctccctgtgtccgaatatgctcattttctttgtatctctgccttgatctttacctatgaggacatgaaccctgtggggtcaagcctcacaatagtgaccctgtcttacctcgttctgagcaactggagggttaggcctccagcaacaacagatttggagaccaagtcccctataacaaagccttcttgtgagcagtgtggggacattgtcatacacagtcaccttctggtctctcctctagccatgagaacttggtagcctgcccacatcccaaattagacgtatggagcggagggacacacatgaggatgggtgaggcaaagcaacactccaacccaggccagcctggaccagccatgaaaacaggttcaggccctggggccaatgggcagtgcccccaaacccaccttggtgtggtctcaccttccctcccattccccagggagtccctgactcttccaagcctcttgacgccagcccaggaggctgcgggtttacagaggggcaagcagacctggagaagaccccaggcctccagaggccctttgaacccctccagggccaggcttatttgtacttcagagctaacttcccttaagttacatttgccagaatttgctgatggctttaaatagctcctaattaccttccagatggacagtggagcaatgagaggccaacctaggttgttgtgcctccctcccacccacccacccctgcccccagacacagacgtgtgctgagggctcccaagagatgtaggagcctggcctcagccccagccaaggcttcagcttggctgaaagaccctggaaaagcaggtgccaaggcactgtctactcctccacccaacaccaacccctcttcctccttgcatgtgggggctacagtggatacctaagccacgtcacccaacatctcctgacactcattcctagcaggcaaaggacttgtgtgtgtctgaaatgggaggtgaaagagactcccagatgtttggggctcatccatgctgaacagggctctgaggacctatgtgtgtttcccatggagcagggcaagggccactggttggtggctctgaagaacacacaatttcctcgtgattctggcagccagcagttggtagtgggctaagcagggtgtgtcccctccccaggtccaaagccgattccttctggcttcctgcagttcctgggctccaggcagtgggtgatggtggctgtccttcagtcctctgctctgtctcctcttcttctctgaaagggcacctggtattagatgtgggtctacttagaacccaagaggatactcttgagaatgttagctatgctgtctctgtagagagttcatttccaaagaaggttccataagctagaaggtagacccatcttttttttgggggggtggggtgggcagcaaggtgcacattctgcttcctacagttagggaagcactgcccatcccccagctccacaggcttggctgggctgtgcatggaacaggcatgcaactggcctttcagccctgtccagtatggtaggccaggcacaggggacagaggagctagccctgtgtggaagtgtctgggattagagcagatacatcaccatactcaagcggatccctaaacactggactcaggagggccagagaaggccatgcaagttctccctgtccagcctggtctcagggcctttgcatttcactgtctcaaaaactccctttcctaagctctcccaagcccacacagctatctctctactctgtatgtttatgccacagactctgagcctgtaagaatgagatcccatattatctgccttctctgagactcccccagtgtcaagagaaggaaccagcatgcaagaacaggacaaatgtctgtgaagaaaatgagtgagcgtgaacaggaggtcaaggatccggtcccaggcagctctcagtctgggcaagcatttctaaactttgccttccttcctgttgggggtgaaggtctgggtctgtttggagactcagggtgtttgttcctgcagagctaaggctggctcattccaactaggtaagagtcaagcagccccccccccccccatggaacatcaagctgccttcacgcctgttgcaggggccaggctgaccgtttgctgatgtgtgcagtgcccaactagggcccttttggcgagaaatgtgcattttcgcgcaactcggcccaggaaatccctggctattcatgtgctaacacaggatctagtccccaatggcc

SEQ ID NO: 634 - DNA, 609 bp, Mus musculus
atggcgaaacgcgggccgaccacagggacgctgctgcccagggtcctgctggccctggtggtggccctggcggaccgagggaccgccgcacccaacggcacgcggcacgcagaattggggcacggctgggacggcttggtggcccgctcgctggcacgcctgccggtggccgcgcagcccccgcaggcggcggtccgcagcggcgcaggggactacctgctgggcctcaaaaggcttcggcggctctactgcaacgtgggcatcggattccacctgcaggtgctgcccgacggccgcatcggtggtgtgcacgcagacacgagggacagtcttctggagctctctccggtgcagcgaggcgtggtgagcatcttcggagtggccagccggttcttcgtggctatgagcagcaggggcaagctcttcggtgtgcctttctttaccgacgagtgtaaattcaaagaaatacttctgcccaacaactacaacgcctacgaatcctacgcgtaccccggtatgttcatggccctcagtaagaacgggcggaccaagaaggggaaccgagtgtcgcctaccatgaaggtaacccacttccttcctagactgtga

SEQ ID NO: 635 - protein, 200 aa, Mus musculus
MAKRGPTTGTLLPRVLLALVVADRGTAAPNGTRHAELGHGWDGLVARSLARLPVAAQPPQAAVRSGAGDYLLGLKRLRRLYCNVGIGFHLQVLPDGRIGGVHADTRDSLLELSPVQRGVVSIFGVASRFFVAMSSRGKLFGVPFFTDECKFKEILLPNNYNAYESYAYPGMFMALSKNGRTKKGNRVSPTMKVTHFLPRL

SEQ ID NO: 636 - DNA, 22517 bp, Homo sapiens
gattgagtgtataccttggcgagtgttcaaatccttgagtgacatcaccataacgaaacttcaattctgtgtcttccacctgaggacaaggcttcttggctttgccatcaacagaaatagaaaatgggaatgaaattgaggccaaacgccatattattctagcaataagtagtggtcatatgaaatttttttttaaagccctgtcctaggtcacattaaaagattcatttcggccaggtgcggtggctcacgcctgtaatcccagcactttgggaggccgaggcaggcggatcacgaggtcaggagatcaagacatcctggctaacatggtgaaaccccgtctctactaaaaatacaaaaaattagccaggtgtggtggcgggtgcttgtagtcccagctcctcgggaggctgaggcaggagaatggcgtgaacctgggaggcagagcttgcagtgagccgagatcgcaccactgcactccagcctgggcgacagtgagactccatctcaggaaaaaaaaaaaagattcatttctaccagaattttatttgtgctctttacttatcaattatgtgatattacattcatggcattttgattaactatgtattagtaaaagttgtttaaagtaaaatccagaacaaaaccatttaatgctaacagtcataagaaattcatttgtttgtttgtttgttttgagattaagtctcgctctgtcacccaagctggagtgcagtggtgcgatctcggctcactgcaacctccgcctcctgggttcaagcgattctcctgcctcagcctctgagtagctgggattacaggggcacaccaccatgactggctaatttttatatttttagtagagacagggtttcaccatgttggccaggctggtcttgaactcctgacctcaggcaatctgcctgccttggcctcccaaagtgctgggattacaggcatgagccactgcgcccagcctaggaaattagttttttaaatatttcatttattgcagtgaataatgatagagtgaacagccaggtgctgtggctcacgcctgtagtcccagcactttgggaggccgaggcgggtggatcacttgaggtcagaagttcgagaccagcctggccaacatggtgaaaccccatctctactaaaaatacaaaaattagccccgcgtgttggtgcaagtctgtaatcccagttactcgggaggctgaggcaggagaatcacttgaacctggaagccagaggttgcagtgagccgagatcgtgccactgcactccagcctaggccacagagcaaaactccatctcaaaaagaaaaaagaaaaaaaaaagaataataataaaatgatcaatgaaagactttcgaggttaaaatacaaagataatgggtgagggtttataatatttgtctgctggagtaaagcttattcatgtattttttctaaaataaaagatggcagctgtcaaactggtattgttatagactccactggacacatttttaaaagtaacagaagaggctaggcgtggtggcttacgccagtaatcccaacattttgggaggccaaggcgggtggatcacttgaggccaggagttcgagacaagcctgaccaacatggcgaaaccctctctctactaaaagtacaaaaattagccagacgtggtggtgcacacctgtgatcccagccactcaggaggctgaggcaggagaattgcttgaatctgaaaggcggaggttgcagtgagccaagatcacagccctgcactccagcctgggggggcacagtaaaactgtgtctcccccaaaagtcaattaataaattaattagaagtaacagaaggcccagcgcagtgactcatgcctgtaatcccagcactttgggaagacgaggtggaggatcgcttgtatccaggagttccacgctagcctgggcaacacagtgagacaccatctctacaaaaaacaaaaagaaattagccaggcatggtggcgtgcacctgtagccccagctgcttgggagactgaggtgggaggaacccttgagcccaggagtttgaggcttcagtgagcgatgattgcctcactgcactccagcctgtaacagagtgggaccctgtctcaaaaaaaaaaaaaaaaaaaaaaaaaccaagaacaagaacaacaaaaaagagtaagagtattttaaatcattcatagttaaaatgtaccagagattatccttatccctctgagcccttgtccctgctgaagtcctctcatctgatctcctatcttcttggacaaagaaacacacgtatgtcccaagaatcaagtaatgcttttcagaccaaggtcaatctaaatccaaatttgagtgaaggggtgggtgcatcctgccttcagtgatccagatttacaaacccacatgttataacaccaagttcagaactacccgagagcaaaggagacgtgacttctgtgtgaacaagggactcctccctgataggggagggtgggccccaaagcttcattctagtttttgtcctatgatcacttgagcatccctctcaatcccaatggcaagactccagaatgttcccatccaggtgccaccatagacacctttcttagggtcccccctagatctagtcctcaggcaacacctcttccagggggtgggatggaacctggctttgctgtcctggagggagacagggggaaagagaaggaacccgcctgaggcatggatgtctcacacagccagggccgggtggtcaggccttccccaggcctcgagtccatccagggagagggaggggggagggagggtacagttgccaagactgactttgaatagaacttttcttccacctcctccctaccaggatgcttcccttgaggggcctgtggtctgaaatctggagaatggggagcctctctgcttccccactggtatttcccatcttctctcatggagacaggtggaatcccatgcccagtggtggtgtcagggaggaaagtgggcttctcttccatgttgctgggagaccctgaggaggagggaagggaagaagcaagtggggaggaggcacaaccccaccaccctgagggtcagcccaccaggcctgtggggtgctccttctgctggggaaggttgtgacctcaaggattccctggcatgccccatggggtgagctgagcccatggcaccctggctttcagcacccctcaaagggagctgaaacccttcctgggtccacaaagtcctgcccatccctctgacctcatgcacccacccagcttccacacactggcttcctgaagctcccactcttccaccttggctggctcctactcaccctttctttaggtctcggctgaaatgaccctgtccctagatcccatgactctcctgagcaggcactccataaaggctcactcagctgacggggtgccagacccctgagcgggaaaggtgggtccttaggtaacatgggggagccctttccttcttggccttccactggcttctgtgcaaggaatgggtcactttagcagcccttaggtgagtcccttctggctctgaccattttttatttgaaatattaaagagactgccgggagttggaggcttggtggtctgttttgtgatcctccaaatgaacaaatcaactggggttatgatatcaattcatggagcttaagccccactctgatgctgacagaagagttcacctgcacagtttgagcccctgacatccctctgaggcagacaaggtccagaccaccagctccattttgctgcaggggaaactgaggcagacagcagcatggtcaggggcctgactttggcgtacacagcaggagtttgagttttggcttagctctttgctagttccatgaccttgagtgagctgctcagaggctttgagtctgggttaattcttctgtaaaatggtgatgaccagcagggccacaccctgcagggctgggtgagaagaaaagacgatcagccttgcaaagcagccccaccctgcaccaaacccgctcctgccagcacctaatgaacgtggcagcgatgacttttatctggagaggtactggcgatcctgccagctcacagcccgtggataagacaccgggcactttacatgtctaattcttctaattccctagcaagcaatgaaggcagacatcgggtcctgagaggctcagcaaatcacccacattccctcagtggtgagagacgccaggacctggctccccagccctgcactcaagctgggtagtcacaccactcagccagcgatggctgtgggcacacatcaccgtgtgcctgcccgttctaagggctgaacgcacattctctcatgtaactattccagaagccctctgaggtgagaacgctgattttccacattttacagatgaggaaactgaggcatggcttgtcttccatcttcccagggttgagtatctgatatgtgcaaaagatctgcacgcgtgtgcacagggaggcaggtggttttattgattcgcagtcattgaaaccgcccccaaagcctgtcgcccagacctggctgggccaccttcagagtagaagagaaacagggcagaataacgggagaggggaaactctcctggacgcagaactgggtaagacatcgctataagccaaggagtgacctgctgtctctttaatgccccaggatcaaggtaacttgaaaacaacaacaacaacaacaaaaaacaaacaaacaaacaacaacaacaaaaaaacatggaaaacagtatggcagtttctcaaaaacttaaacatagaattatcacctcatccagcaattccatttctgggcatattcccacaagaaatgaaagcaggaactcaaacagatatttgcacaccgaggttcacagcagcatcgtccacagtagccaaaaggtgggagcagctcagggaccgctgacagataagtaaataaataaaacgtggcccatccatacctggaatattattcagcctctaaaaaagaaaaaaagaaagcaaattcccacacatgctacatcgtggatgaatcttgatgatgttatgctaagtgaaatcagccagatacaaaaaggacaaacattgtgtgattccactcatgaggtccctaagtagtcaaattcgtagacacagaaagcgaagatggtgggtgccggggctgggggagcagaatggggagcgagtgtttaatgggcatggagtttcagtttgggaagatgaaaaccatctggagatggatggtggtgatggttgcactagaatgtgagtgtccttaatgccacttacccgtgcacttaacaatggctaaaatgagagaggctgtgagtgtgtggggacagagggtgtaagggaactctctgtaccttcctctccattttgctgtgaacttaaaactgctctgaaaaaagtcttttaaaaaatagttaacatcaggccagacacggtggctcatgcctgtaatcctagcactttgggaggccgaggtgggtggatcacgaggtcaggagaccgagaccatcctggctaacacggtaaaaccccatctctactaaaaatacaaaaaaaaaaaaaattagccgggcgtggtggcgggcgcttgtagtcccagctactcaggaggctgaggcaggagaatggcgtgaacctgggaggcggagcttgcagtgagccacgatcgcgccactgcactccagcctgggtgacagagcaagactccacctcaaaaaaaaaataggttaacatcaattttatgttatgtatcatgtatattttaccacctttttttttcttttttgagacggagactcgctctgtagcgcccaggctggagtgcactggcgcgatctcagctcactgcaacctccacctcccaggttcaagcgattctcctgcctcagcctcctgagtagctgggattacaggcatgcaccactacgcccagctaattttgtatttttagtagaaatggggtttcacaatgttggccaggctggtctcgaactcctgacctcaagtgatctgcctgcctcggcctcccaaagtgctgggattacaggggtgagccaccgcacccaattaacaccattttttaaaaagctaaaaaaaaaaattggctcaatctccccttattctgaaggtcctaaagaaaaacatgccacttgctttggggtgcttcggctcagtgtagaccagtctatcccaccggccttatcatcctcctggacttttgcagaaagacatcattgtgagggtgtcttgctgaagccaagaaagggaagttgaattgagaaagcagttgagctatttacaaagtttacacagcctgggcccttgccccgggctgagctcagtcattttgccctgaggactataagtggactattatgcagcactttcttttttattattattactattaagccaagtaagttcttaacagctaacacctgagctggtggctctgagaagcctcttcactccttcacgggagacgggaccattcacatgaagatcctacattgttgtttttttttttttggaggtcgaaaaaggtcactgttaggaggctttctgggcctttgctcctctccctcaatttattacccctccagtggctgatgacgtacagggagacttccacccgataatgacatggctttgtttatttcacaaattcccagcatttactgttaatcagacccagtttgaaccacccccaaggggcttgcagtctaaacagctcactttgctcagcctcttcctgaggtcaggcactgtcttgctaaggccgacatcagctcatgcccattttacagatggggaaactgagaatgctaagaagtgaaatagcgtaaggttatacaactaacagggagacagcctaaacttgaacccaaccggaagcccaacatggccccaagccttcctcgaaccccaggacttggcaaagcgggcgtcctggggtaaagcatggcagaagggctttgggtccaagctaagtgagggtcctgtttctagatcacctggccaggtgcagtggctcatgcctgtaatcccagcactttgggaggctgaggcgggaggattgcttgagctcaaaagtttgagtccagcccgggcaatacagcgagacctcgtctctactaaaaaagaaaacaaaaaattagctgagtgtgtagtcccagctactcaggagactgaggctggaggattgcttaagcctggaagtttgaggctgtagagctatgatagagccactgcactttagcctgggcaatggagcaagatactatctcaaaaaaaaaaaaaaaattatatataggtccccttgtccctctgctgagaagtaaccagatctggaaaagatttagtcaccttggtccaactatttctttcacataaagaaaaaaaaaggcaatgcagaccttcccataggggcagctctgcctgaggcctttgcaggtacctctgtttgtctgccccggggcacagtggcagattgggcagggcagcttgcagtgaggattgctgatggatgagctcctagtgtacctagccagccatttactcacaaacagctattgagcacctactatgtgcccagcactggaggtacaactggcaacaacacaaatccgggcttgctccatggagatgacaatctaaatgcggtggagggtcagctaacaagtgcagaaggttctcttaagagctcaaagaagctccaaccagaaggactgggcaggggatccagaaggcatccccgagtggctactccaatggagtggcttctccattcaggcaaacctgaatgggataagtcattggcaggaagatctggggccgggggtcatccagtgggaaggggagagatgacgcggtcagcatggcgggaacacaggagcagaaaggaagcaggtgggaagccaggtcaagggccaggggcacggaaaggggtcagatgcagataagtgagtgcttcctggtgcatccttcatccgcaattcatccttacctgtgcttttgttgcctccattgcacagctgaggaggccagggcctgcggaggttgagagtgtgctcagggagcccccggagcaaagtggaagccagattccagatcagttctgctgggaattcccagctcccaaaagccctgctggctgtcagtccccagtcaccacaagcacctatcctgtgtgggtgggcctgcagttctgggagatatatcagctgcctgcagcgtcctttgctgaactcacagcaaataggagagacagggaggggtccttgggaagccctaaattgagcttgctgtgggagtcctgggaagaaaggagcctcatcctatcaaaagccgggggaagacatcagagtccctctgctcaggtcagctggcacaggtgggtctccaggcctgggtctcacttccccagagggtgtgttcgggtggccccaggctgagggaggaaagcccacctcccatgtcattttgcaaatggggagtcagggacctagagatggaaagacaacacagcaagtgagggatgggttctaggtcccctgcaccctgcaccctgcaccctggccaacgatgtctatttggcaccagatctgcaggctcatctgggggaccccaggacccagaggcagccgggttgcatctcgaagctgtgagctgcagcccaggaaggtccaggtctgggtggcgctgcccaagcaggctgcaggcccaaggaggaacaaagatcctctcaaggggtgcggagctgaggttccggtcctgccaaagccacttgatgacccccaagtgcccccctttctgcacctcagagaagagccctcaagcctcccaggtcccctccaggggcacgaataagccccagcagggttctgaaggggtcccaggaatctccctgtggggatgcggtggaggtggaggaggctgcggtggcctggggacatctctggtcacaggtgctggtggtatgagagatggggtaggcaccaagccccctgcagctgtggctaggcgggcctgcaggaagggccaggcaggctcctcagggaccacaaagaacaggggttttcacacctaggtgggcctgcatctagctaggacagtccccatcaggccataatgggcacagtgggaggtagaaccatgagtgagagaggggaggcttccagaggcctggcctgggtccctgctagattgagggctctggctatggtacatggatatttctgctgtggaatcaaaggagcaggggatgctgaatatcccctctggccctatgccctgctacctgtcctttcacggaagggtgtgtgtgtagggggtgcaggaccaggcctccctgggtgcatctctgccaccttgccctttggctcaggtggacctccaccaggtattcagaactccagcccagaaacgcgccaagcctgtggggccaagacctagggggtgggggtggcctccctcccgcctgtagccaaagggtcctcccttgcccagccaggccccggtgtcgcttactgctcttatccacccctccttcccaggccggtcctcaaggccccagcaaaggaaccaagttcccgtgagcctccgaaaggcgaagggcaggcagcagccgctggcttctgcgcccactaggagcttcggatgcccgagttagggctgcgccaaggcggccggagcagagagggagacggggacggggacaggcagggacaaagtgcaagaggcaaaactggctgaaaagcagaagtgtaggagccgccaaggggcgggacgaacaggtccgtgggccgggcggagccaagggtgggggccggggtccctccaggtggcactcgcggcgctagtccccagcctcctcccttcccccggccctgattggcaggcggcctgcgaccagccgcgaacgccacagcgccccgggcgcccaggagaacgcgaacggccccccgcgggagcgggcgagtaggagggggcgccgggctatatatatagcggctcggcctcgggcgggcctggcgctcagggaggcgcgcactgctcctcagagtcccagctccagccgcgcgctttccgcccggctcgccgctccatgcagccggggtagagcccggcgcccgggggccccgtcgcttgcctcccgcacctcctcggttgcgcactcccgcccgaggtcggccgtgcgctcccgcgggccgccacaggcgcagctctgccccccagcttcccgggcgcactgaccgcctgaccgacgcacggccctcgggccgggatgtcggggcccgggacggccgcggtagcgctgctcccggcggtcctgctggccttgctggcgccctgggcgggccgagggggcgccgccgcacccactgcacccaacggcacgctggaggccgagctggagcgccgctgggagagcctggtggcgctctcgttggcgcgcctgccggtggcagcgcagcccaaggaggcggccgtccagagcggcgccggcgactacctgctgggcatcaagcggctgcggcggctctactgcaacgtgggcatcggcttccacctccaggcgctccccgacggccgcatcggcggcgcgcacgcggacacccgcgacagtgagtggcgcggccaggcgcgaaggggcgggggcggggggcaacggccgccgggccaacccgctcagtcacactctgagaccctcggcgggcacctgctcgggggccccgggaaccggggcggactcgggctccggtcccttctgacgcggggctggggacgcagacactcttggctccggcagcccagcgcaacccctgaggccgggcgccgcctcccgccttcagaaactcgggctccgagcgccgaattccagcgccttcgcccgtgggcacagggcgcgcggtgcagccacagggggcccgagacacgcgccccggcctggcccaggctggggaaccgctggggtcgggctcgcgtctgaaggtccgggactgggtgcggccgccgggggtcccctacacaggcaagctaatctgagctagcgcaggcttgggctccggaggccctagagggcagcttgggctctggaggcccttgggggcggctgcgccgggaaccctggccctttatccccaaccccaccccagaaatagggtccccggaggcgaacaagccgaggggcggagtgggccagggatcacctgccccgcaatgacctgcgccccgcccccaggcctgctggagctctcgcccgtggagcggggcgtggtgagcatcttcggcgtggccagccggttcttcgtggccatgagcagcaagggcaagctctatggctcggtgagtaccgcaggggtctggctaggcacctagttgggaacagcggacatggctagcaggctcgtggcttctccagccccacctgtgcctgggtcttggaggggtggcagggtcaccaggtcacgggaccggcaggcctccccagacaaaggaagcagccccaaggcaggaacaatgaggttcctgccatccctgagtgggcccctcccagaccgaggaaagggcgctattgagagcccttcccttctctagtccagaggggtaggtctcagtgttggaactgcgggcttgaggctggacacggagggaatgaattctctggctgctaggtgcagggcaggtggtgagagcaccagctgttgtgggctggccatgtccccttctcaccctgtgtgggtcttgacaccttaactgctcagcagagacatctcagcccagggtggggggtgggacagaagggggttctgacccctggcttcaggctgggtaccttgcccaagaggtgccccagccctgacactgccctgctttgctgcagcccttcttcaccgatgagtgcacgttcaaggagattctccttcccaacaactacaacgcctacgagtcctacaagtaccccggcatgttcatcgccctgagcaagaatgggaagaccaagaaggggaaccgagtgtcgcccaccatgaaggtcacccacttcctccccaggctgtgaccctccagaggacccttgcctcagcctcgggaagcccctgggagggcagtgccgagggtcaccttggtgcactttcttcggatgaagagtttaatgcaagagtaggtgtaagatatttaaattaattatttaaatgtgtatatattgccaccaaattatttatagttctgcgggtgtgttttttaattttctggggggaaaaaaagacaaaacaaaaaaccaactctgacttttctggtgcaacagtggagaatcttaccattggatttctttaacttgtcaaaagttgtcacgagtgtgctgctattctgtgttttaaaaaaaggtgacattggattccgatgtcatcccctgtagtatggcgtggagcatctctgtctggaaaggcccgcctgaggcttgggcagccagttcagggagctcccaggcttggctctcggctagcatcctcagaggcccactccctttgtgccctgttgctattaatcgggacatatcggtttacttcgggtacagaaagtgcggtgttgaagtcctcgctgccactctgtttttagatctgccaagactgacctttgaactttcctgtagtcaatcttcctcgatctaccagatgggagagacccttggacaactttataaactcctgtttgccttttttggatcagcgacagcccccatcgctgtgactattggggaaaagacgaagctctttcataaattccatggagaggaatcaatatcccactggaaggctagaaatggacaagatagtgtatttgcaatcacaaacaaaaccctagtgatgaaaaataatttgtgatggcagatgcttctgatggtgtgatagaatatgtttttgaaaacaaaccatcgaaccccccgccccacccccaaaacgggcttccctgtgtttagggagctttgggctagaactagctacgatttttaggtgaaatgtccttgtaattgtacaaagcacttggtgcagtgtttgcgtggagcagcctgctgctttctgatgcattccctgtttaagtgcgtttaacatctacctcacaagccctgaaaccccaggcaaaacccacagaaagctcatacccggtgcaggagtttgccatcccaagtggctttttttccatatgtagccaaaaaggattgcagatagcgtcggtgcgtcccattcgaaccttgtcacgtttgagctatctttaccctgtgatttacttttagtaagggtgatcatggtgaaaatatttgcagacagctgttacagtacactatatggtcaccaagtaaccttatatttttctttatatattttacaaatgtaacccctgtcattgaagcaaccgtggaagaggcagggtcggtgatgtttaaaaaaagttccgaggtgatggcaaacatttaattttaatgaatgactttttagagtttatacaaaatgaccttagcttgctaccagaaatgctccgaatgtttcgtcaagactttaatactctcctaggatgtttctgaactgtctcccgaattaactttatgggagtctacagacagcaagactggaaaatctgattggagtttttgtctttcacattccttttgaaaactctttgttcgaatgcaaatcatcgacttaaaatactattcttaaccaaggcctggaagaaagaagacacttgcaaagccgctaagacaggaccacacatcttaaactgctgttcctaccatgcactaaactgtttttaagttttaaaccacaccctaggctccaggagtgttcaggaaagatggtgtttgtaggtctccatgctgtttggcgttggggggtgtggagggatcatccgtcgactttctgaattttaatgtattcacttagtaacaaaccatgattgtcttaaatgccttaaattattatgagatttcttgtctcagagcccaatcagattgtcaggaattaacatgtgttaggtttgatcacccttgaccacttcttatagatatttcttcaacaaatcatgtgtgatgcctgtaggaacacaactgtacctttaaaatattgttttcatattgctgtgatggggattcgaggttcctgtatgtgccactgttttcagaatctgtagttttatacaggtgccgaccctcgttgtgatgtatgtgctgtgcacattgacatgctgaccgacaatgataagcgtttatcgtgtataaaaagacaccactggactggatgtacacaactgggaaaggaattaaaagctattaaaattgtgccttgaaatgccaagacctggttccctccccctgtcttccaggggtctttctatttgaggcctgagcctcacatggctgggggttggggtgggggcaggagagacgaattttagccagctgtgtccacacaaatgtagccttgaaaacaggagcctggggggtgtgagtgtcacaaagttttgccatgacagagtcttgcagtttattctcattctcctgatggggctaattcacgccattcccgcactgtaactggccctaaactctgtgcccctcccattggcctcctgttctctaaagcaatttgcacttccctagggggagccgtgaagctccagagctggtcattaggaggcagactcgagaatatttttcaaaatctgagtagacaccatccatgggtattgaactcaatataatgaactgcagctagtcttttatttttaattaactaatttttttatattttttgagatggagtctcactcttgtcgcccaggctggagtgcaatggcacaatctcagctcactgcaacctctgcttcccgggttcaagcgattctcctgcctcagcctctcaagtagctggaattacaggcatccgccaccatgcccagctaatttttgtatttttagtagagacggggtttttctatattggccaggctggtctcaaacctcaggtgatctgtcctcctcggcctcccaaagtgctgggattataggcgtgagccaccatgcctggccagcagttactgttttataaggaggaaatggaactaaatcttatagaattaaaatcatctgagtgtatcaatcacagtaagggtgcaaactgttttgtgaaaatttgggttcaattatatacaattatagtatttataactagtctttcctaggaagtactcatgagtgcagtggattgcttttaagaaagctaaatgctggcctaatgtacctagaatctggggttcccctctccctgtaagacatatccagttgctttgcaaaaaggcaatcagggttggaaaatccttaattgtacgtaatttgctttccaaggcattatgttcttctacccttaaaaaaaaatcattatagagatgggttttcactttattgctcaggctggtcttgaacttctgagctcaagtgatcctcctacctcggcctcccaaagtgttgagattacaggcgtaggccaccaagcccagcccttttctgtccttatttcttgacagccatgatctaggtacgacaaagaaatacgtaggtgatgttagagggtgaattatgtccaaaagatctcttccaaaagatatgttgaagtcctaacccctaggacctcagtatgtgagtttatttggaaatagggtctttataggggtaaaatgagactactgggggtgggccctaatccactatgactggtgccctcctacaaaggaggccatgtaaagagacacagggagaaggcggcgtgaagatggaggcagatgggtgatgcttccacaagccaagggctgctgaggggtgccagcaaatgcccaacagctaggtgagaggcctgggacaggggctccctcccagcctcagaaggaaccaattgtgcggacaccttgacctcggacttgtagcctccagggctgtgagataatcaattactgttgtttaagcccacagtgtgtggtactttgctgccaccggcggcctttcacactggggtggggaggggactgcaacccggacgatccagccatctggatctgcaacccctcatgcatgcagaccctgtaggtctctgtccacatctgtcctggccaaacaaggaatggctcatccagcttctggggtggaaatgtacccatcgttggcaaaatcgatcagctgaactgagctttcgtcttggctttccagctcctagcatagggggacaatggggagtcaaggacaggtcccaagagagattaaaaagtcactcattcacttaacatacttgttgagtgcctcctttgtgccaggcacaattagcgaaggaaacaaggatccctgctcacctagagcctcatcgtaatgagggagatgacagtgaatgaggaacacgggccacctgggaaggtggatggtgccaagacagagagagagcaggatggggaggtgtgggggtgggggtgggggtgggttgctatgaaggtgatgacgtctaagcaaagacttcaaggtgctgagggaggaagccgtgcgaggaacagtgtccaggcagagggaacagcccatgagaaggtgtggggctggcagcaggcctgggatgtttaaggcactgtgggatgggcagggaggaggcagagtcagagaggccagctcctggagccttggaggccatggtgtggactgggcttttccttacagtgagtttgtgccatctcatagccctgggatggagcagaggaaggttgagatgagatggtcggaagctgaggagtcccaggaggaagcgattatggggattcaggttgggtataaggttgcttaaggctggtgtggtggggagtgaaaagtcaaattaacaaaagaggagatggggtttctcagaatcagcctgctgcctaggggaccaacatcttcgtggatgagtgcagggtttggggccagccccacagcttcgtaggtgggtgacccacagcttccttgctgaatgaccgtgggtgagccaggggaccccgcctcacctctcctcatgattcccaccacctgtgtctggagtgaggatggagaagacgatgcatgtaaagtgcctgtcacagtaagcagtgactgtcgtctgttagattacaccctacttatccaaagtttcactttccatagttcggttacctgtagtcaccctcggtctcaaaatattaaattccaggggatacacagtttgtacgtttttttgttttttgtttttcggtttttttttgagatggagtcatgctctgttgccaggctggagtgcagtggtgtgatcttggctcactgcaacctcagcctcctggattcaagctatgattctcctgcctcagcctctcgagtagctgggactacaggcgcaagccaccacacccagctaatttttgtatttttagtagagacggggtttcaccatgttggcctggctggtctagaattctagacctcaagtgattctcccgctttggcctcccaaagtgctgggattacaggtgtgagccaccacacccagccccctaatgggctgtcttcagaaacacagcgagtggccctgtgctggttccaccagactcagcctctcaagggaagaccctggccacaccctaaggaagggccttttctcggcatgacggtggcccctagcactgggctagaaaatcatcccattaacgggaagatagaaaagactgggacattaagaccataattaaatcttttaagggaatgacagtaatacagtagtccctccttatccacaggggacaggttccaaaaccccactggatgcctgaaactgcagatagtactgaaccctatacaggcatcccttggtatctgaggggactggttccaggacctcccctggataccaaaatctgggaatgctcaagtgcccgatatgaaatggcatggtatttgcaaataacctacgcacgtcctcccatgtcctctaaatcatctctagattacttacaatacctaatacaatgtaaatgctatgtaaatagttgtcatactgtgctgtttagggaataattacaaggaaaaataatctgtacatgttcaatacagacccagcttttttcccaaacgttttctttcttttttttttttttttttttgagacggagtcttgctctgttgcccaggctggagtgcagtggcacgaactcggctcactgaaagctcctcctcccgggttcacgccattctcctgcctcagcctcccgagcagctgggactacaggtgcccaccaccatgcctgactaacttttttgtatttttagtagagacagggtttcaccgtgctagccaggatggttttgatctcctgaccttgtgatccacgccttggcctcccaaagtgctgggattacaggcataagccccaatgcccggcctcttttcttttttctttcttttactttctttctttctttcttttttttttttgaggcggagtcttgcgctgtcacccaggctggagtgcagtggcgcgatctcggctcactgcaagctccgcctcccgggttcacgccattctcctgcctcagcctcacgagtagctgggactacaggcgcccaccaccgcgcccggctaattttttgtatttttagtaaagactagggtttcaccgtgttagccaggatggtctcgatctcctgacctcgtgatccgcctgcctcagcctcccaaagtgctgggattacaggtgtgagccactgcgcccagcctctctctctctttccttctttctttctttctttctttctttctttctttctttcttttcttttctttctttttctttctttctttctttctctttctccttccttccttctttccttacttttttcttttttttttgtcagagtctcgctgttgccctggcacaacagcacctctgcctcactgcaacctctgcctcccaggttcaagagattctcctgcctcagcctcctgagtagctgggactacaggcacccaccaccaggcccagctgatttttgtattttcagtagagatggggtttctccatgttgtccagggtggtctcgaacccctgacctctggtgatccacccacctcagcctcccaaagtgctggaattacaggcatgatccactgcacctggccctccaaatgttttcaatctgagggatgcaaaacccacagatatgagcgccggctgtatacactcttttttttttcctatacatacctataatgaagtttaatttctaaattaggcacagtaagagattaacagtaactatcaaattcaattataacaatatgtcagcatcactactcctattttgggatcattatcaagtaaaatccgggtgacttgaactactgactcataagcaggaccgtctacagtgtggagacgctggacacaggcacgattccgtcccgggtgggacagagcctgggcggcacaggattccatcactccactcagaatagtgcatgatttaaaacatacaaaagtacatacaaactggccgggcatgacagagcaagactcagtctcaaaaaaaaagacagccctttaggaagactgctcctctcaaatgcagcctgcactggcttactctggtctacattaaaataagatcaagggctcatgagctcagagtgtttcttcaatgtgaataattttaagtgtcctcaattcatcattcaagttctttctttctttctttctttctcttttttttttttttcttttttgagacggagtttcactcttgttgcccaggctggagtgcaatggcgccatctctgctcaccgcaacctcgcctcccgggttcaagcgattctcctgcctcagtctcctgagtagctgggactacaggcgcccaccaccaggcccagctaattttgtagttttagtagagacagggtttctccatgttggtttggctggtcgcaaactcccgacctcaggtgatccacccacccgcctcagcctcccaaagtgctaggattacaggcgtgagccaccgcgcccagcccatcattcaaattctatatgcttcttatgaaaggaaggagggaggctggacacagtggctcaggcctgtaattacaacactttgggaggacaaggtgggaggatcacttgagcccaggagttcaaggctaggctgggcagcatagtgagaccccatctctacaaaaaaatttaaaaattagctgggtgtggtggtgcatacctgtagtcctagctacttgggaggctgaggtgagaggatcctttaagcctgggagttcaaggctgcagtgagctgtgattgaggaaagtgacatccgtgctggtccatgtcctgtggtggggaagggggacagcaacccagcacagacccaccctcccccaggaccccatgtaggaggggtcctggatcgagctagaagaactggggcccctgtaatgaatcaaactgcccaggagacccagggactggaacacccttgctaggcaacacaacatcattttcacgcccacccctgcccccagcaagactcctctgctgggtctcagatcttccccactgggaggctgccagggttcctcagcctccgtgggtccacacccaatcacagccatccccagcctgtcctttcttccgtccaggaggacaaggcaagcccttccccccacccacccctcccccagcagcctctcactccatctagttggtttcacctcatcgactctgcagtctaaagacctctccatctgcacaggacctctgtgcaggccgcctctccctggacctgggtggctgcagcagccccttgactggcccccccaacttcttcctctaccctgacaggcccttctctaggggccttctcaccgtgcaagctccatcctgctccctgggctgggatgctttccacagccctgcgacgctcttagactgagatcacagccgtcagccaggccgttctgatcactcactactgcctaatgagctgccccaaacagtgacaaaaccgccaccatcttataactcccagtgtggcaggtcagggatgtggacagggtctggctgggtgatttttctgctttttatggctttgaagatcttggcattggatgggctcatctgggggtctgaggccggcaccctgatgggcaaggctggagggctgggctcagctgggcatcggccagagcacccacacagggtctctccagcatgggagcctctcctggggctggaggccttacgaggcggctcagagggctccaggacgcccaaggcttcttagggccaggcccagaaagttccagaacctcattcctgccattggtcatgaaatcagaccagctctgattcaaggggagaaaacaggcctctgctcacagtgggaggactagcacggaatgtgtggtcatctttcatccgctgcagaggctccatttgcccttcccggtgcccatcctgccagctccctccccacatccctgtgctcggccggctcccggcacattgacgttctctcagagcacacaggtaccatccgcttggccacagggcctttgcacacaccaacctcctgcctggaaggatcttccccacccctgcacttcacccagctggttttcccagggcagctgtgacaaatgaccacaaaccaggcagccttaaacaacagaaatgtattgtcttgcagttctggagggcagaaggcagaaatcaaggtgtcagcagggccctgctccctcagaaggctctggggggtggtccttccttgcctcttctggctgctgctggctgccagcattccttggcttgcagctgcatcactcgattctgcctccatcaccacatggccttctcctctgtgtgtctgtgtgtccagatttccctcttcttatgaggacgccagtcactggatttagcctcgtcccagaattccagcaggacctcatcttagctttcattgcctctgccaagcccctatttccaaatgaggttccattcacgggctctagggagacaggacattgggaagacacccatcagcccacacaccagttactcagattcattattaaagtcatgattcaaaggtcctttactctaaggatgaaagaagtgaggcatttggaagataaagggcctggcatacagtaggtgcttattccagccagctagtgctgtcatgtccccagagccttctctggccactcccagcccacactgggccatgcgttgtcttatcacatactctctggcatcctaggttaggttccccagcaacaaaacccaagactgggatccctgagcaaagagtttgtcaagggaggagctcccaggaagaactggcaaggaaaggagagcagcaggacaggccaaagaagcggcaatca

SEQ ID NO: 637 - DNA, 1362 bp, Homo sapiens
cggccccccgcgggagcgggcgagtaggagggggcgccgggctatatatatagcggctcggcctcgggcgggcctggcgctcagggaggcgcgcactgctcctcagagtcccagctccagccgcgcgctttccgcccggctcgccgctccatgcagccggggtagagcccggcgcccgggggccccgtcgcttgcctcccgcacctcctcggttgcgcactcccgcccgaggtcggccgtgcgctcccgcgggccgccacaggcgcagctctgccccccagcttcccgggcgcactgaccgcctgaccgacgcacggccctcgggccgggatgtcggggcccgggacggccgcggtagcgctgctcccggcggtcctgctggccttgctggcgccctgggcgggccgagggggcgccgccgcacccactgcacccaacggcacgctggaggccgagctggagcgccgctgggagagcctggtggcgctctcgttggcgcgcctgccggtggcagcgcagcccaaggaggcggccgtccagagcggcgccggcgactacctgctgggcatcaagcggctgcggcggctctactgcaacgtgggcatcggcttccacctccaggcgctccccgacggccgcatcggcggcgcgcacgcggacacccgcgacagcctgctggagctctcgcccgtggagcggggcgtggtgagcatcttcggcgtggccagccggttcttcgtggccatgagcagcaagggcaagctctatggctcgcccttcttcaccgatgagtgcacgttcaaggagattctccttcccaacaactacaacgcctacgagtcctacaagtaccccggcatgttcatcgccctgagcaagaatgggaagaccaagaaggggaaccgagtgtcgcccaccatgaaggtcacccacttcctccccaggctgtgaccctccagaggacccttgcctcagcctcgggaagcccctgggagggcagtgccgagggtcaccttggtgcactttcttcggatgaagagtttaatgcaagagtaggtgtaagatatttaaattaattatttaaatgtgtatatattgccaccaaattatttatagttctgcgggtgtgttttttaattttctggggggaaaaaaagacaaaacaaaaaaccaactctgacttttctggtgcaacagtggagaatcttaccattggatttctttaacttgtcaaaagttgtcacgagtgtgctgctattctgtgttttaaaaaaaggtgacattggattccgatgtcatcccctgtagtatggcgtggagcatctctgtctggaaaggcccgcctgaggcttgggcagccag

SEQ ID NO: 638 - protein, 202 aa, Homo sapiens
MSGPGTAAVLPAVLLALLAPWAGRGGAAAPTAPNGTLEAELERRWESLVSLARLPVAAQPKEAAVQSGAGDYLLGIKRLRRLYCNVGIGFHLQALPDGRIGGAHADTRDSLLELSPVERGVVSIFGVASRFFVAMSSKGKLYGSPFFTDECTFKEILLPNNYNAYESYKYPGMFIALSKNGKTKKGNRVSPTMKVTHFLPRL

SEQ ID NO: 639 - DNA, 24281 bp, Mus musculus
  misc_feature (1)...(24281): n = A,T,C or G
ttcaccggtaatgaatcaaatcctcctggggcagggctggcagcctgggggtgaattggaggctgaggaagagcctctgtggacccagtctaccaaggatcttgggtcctggctgttgagtcctggtatacacaggagagtgcacactatagtttccatgttgggagggtgggcaggacacctatctcccatggatgagtacctctacacagttggcacagtgcggtgggtcagttagtaaagtgcttgctgcacaagcatgagaatctgagttcaaaccccaagtatagatctctacatccaggcaaggccgagcatccctgaggaggcagaaactggaggatctccatgcctctctagtcaactgacataactgaatctttgagctccaaattcagtgagagactctagctctccagtgacaagtaattgggaaggagactatatgttgacttctggcctccacatgtgtaagcatacaacatgcataagtacctaagcacacatgcacacacatgggcatccatactcagagagaggaagacagaatgacccattcttaggcagttcagcgcttgttttcctcatctgtactgtagggatgctctacttcagtggggacacagtgtttgccttcacagcacacaatgagcttttagatagcatggaccttgccaaccctaggcccctgacaaccacctagtcatagggattctagctatcgagagttgaagtcaggcaggtcacactgggcagatgcaggtgctgagtgggctcttagcaagctgtcctggaggcaggaagaaagaaagggcagggtgtctggaggaagctcatgcaagaggctcatagagagaaagacggtccctatccagggcatcctcccaggtgaactttgcctgctcctgcctggcactcagggcctggggaaaaacaaatgtaccctcaccaaacagggatgcctctgatttggtggctttctggtaaggtccccatcccaggagcttgtgacagtctcatgccaggacagagagagcttatataggtctgagtattataagaaggtatctgagtatattatattggtatctgagtataccaataccttccttcctcagctgcatgagggaatctggggagccccaaagacagacagcttaacccacagctcctgggcaggcacaacgtgagtgggcagaagtctccataacagatcccatttgtcagcagtgggagcttgtcttgataaggttaattgaggtggtgtcctggttagtttttattatcaacttgacacaatctgaagtcagctggggagagagcacctcagtagaaggtttgcttccatcggtttggccatgtctgtgagggtctgtcctaattagtgattgaggtgggaggcccactgtagggggtaggtgtgcccaggctttgtaaaaaagcccagctgaaggtggggtggtgactgcacatgcttttaatcccagcacttgggaggcagaggcagtcggatttctgagttggagagcagcctggtcgacagagtgagtttcagaacagccaaagtacacatctggagaagacagacagacagatagacagacagaaggcaggtgagaatgaccctgacaataaacagcatttctccagtctctgcttccaggtttcagtcctgacctccctcgcggatgtactgttacctggaagtctcagcagaaataattcttcccacaagctgcttttggctgtatttaccatagcagcagaaaagacactgatcaatgaaaagatgggcttgtgagcggagaaggtccccatatgtggacatgaaaagaaataggagataccaaatcaaggggggcagcctcaccccagctggnnnnnnnnnnnnnnnnnnnnggaagataggcctagggtcacatggaaggccctgctggcttcagcaggtggccttgggacttgttcagtacagaatctcacctaaggtcctttaacaggccttcagagatgtcatccttgcaatacctgtggtctctcaatggagtactcacttttctcacctctgtaaggaaggaagggagctctacttggctcatagtctgagggcacagtccattgtggtttcaagcgattgaaggagctgatcacatcttgtccacagtcaggaagcagaaagatgaacgttgactctcagctctccttctccctttagttctatggaggtctccagcccatgaaacggttccagcccacattcagggtctttctccctcagttaacctttctggaaactccctcacagacttacgtagaagtgagtctcccaggctactccaaaccctgaccagatgacagtgaagatggaccagctggctcacttagggatatggtcagctcagctggagctggagagtctctcaagaacctcaactctgggctttaaagtccagctcaaatgaagacaggtcagctctgtctgggctctgtggaactcagtacaaacactctgagagccttaggtaagggctagctccaccaccaggttactgacaacctgtgggtggttataggagcgagaggagggctagagaggggagtgtgctctttccttgatttaagaaggtcaagtttacaaaaggccctatgtaggtaaattctggaaggcaaacaaatgcatgacagtagtgacaggcactgatagctgctggggtcaggagagaaggggtggggttaacagattgagaggtggagagaggattaaacaagtctctcataggggctgtatctatgcccagttggtgcagtacatggccaggtcctgggttggatcctcaacactgcatcactgtggggcatgattgtgcctttaatatcagcagcagaggcaggggaataagaagttcaaggtgggtcatccttagctacacagtgaagccaccctaggctcatgaaatcttgcctcaaaaacagaaacaaaagaaagaaagaaaggaagaaaggaaggtaggaaggaaggaaggaaggaaggaaggaaggaagaaagaaagaaagaaagaaagaaagaaagaaagaaagaaagagagagagagagaggaagaaggaaagaaagagaaggaaagaaagaaagagagaaagaaagaaaggaaggaaggaaggaaggaaggaaggaagaaaggaaggaagagggcaggcagaggcaggcgaatttctgagttcaaggccagccaggtccacaaagtgagttccaggaaagccagggctatacagagaaaccctgtctcaaaaaaaaaaaaaaaaaaaaaaaaaaaaaaaaaaaaaaaacaaaaaacaaaaaagaaagaaagaaaagaaaagaaaaaagaaagaagaaaggaaggaagagagaaagaaaggaagaaggagagagagaatattataaatgggccagtggtgtcggctgcagattgctgaacagttgggactatctatgcagcaacatgaacagcatgtgcaagataccttacacctcagcaaagttgctgtctgtatagaaaataaatatgcttgtctgtatggaagacactgcttgaggggtgcattgtccatgggtgcccgagtgtccccatccctggggctgagcacccagcaggtgggtattaagctataaaacttgggctttctcaaggtttggaaaaggctgagttgaaagtcaaaagctatcagcaaaatgcttctgggaacacaagggtgggggcccatcctaacagaggccacaagcgcctggcacaatgcagctaacattgacatctcagagaacataatcctgggaacagtggaacagagaccaggccctatagcccagcccttctcttctgctttttctgcaactccacgttggagctatgtctcccaggatttcctatgaatcactcacaaatgagaggagagaacggaaaggcctgtgatctggcagggatgcttgggcagacagtcatcggccctaatgtcccagtaggacaggcaagggaagggttaaaggccactgcagggggcctgtgggggtgacatcagccaatttgtagaggtcaggaggccactcctcctcccaggtgagatcaaatgctgtagggacaaagggacaaaagggaaggagattgacagggatgctctgggggactgcaccccaagggaacaccccacccccaccctgagaacaagtatggcatggggtcaaaggtcaggttgtttggcttggattatggctttcctttttacctggagagcaaagcaaggcttggaggcttccattcagacctagacctgctggggaaagaagctttgtgagttccagggctagggctagaagcagggtggcagctgccattgtgacccccagaaaggccacagatacctctgaggcaccgcagttgcctccagcctaaggacctcttgagctcagcccattgccacagaatccagggctcaaaggatttgagatttgacagagaacaatgtcagccaattagctaccttgtgcatggagcagccatgtcccgggtggccccaggttccctctggaagtcaagtgcagctttgcttatttgtttaagccatccaccatccagttattagatctgaattcatcttttagggtcagctttgttgtagatttaggatgtggccccagggcaaggtactctgagaaacccttaccccatcccagacgtggtcttctatcatgtccagctggggaagggagaagtgtgtgtgtgtgtgtgtgtctctgtctgtctgtctgtctgtctgtgcgcactttggaacccagagtcttgattctctctgggactgggattgtgaacagtttgcgagccaaccaatatcaaccctagaaacctaacttggatctttggggagaagtgtgcatgctcttcccttccaagccacctctccagcccaaacttcacattgttctaagactgggtctcttactcctatttcccccacccaccacccaccacccacccccgcagccaccgccacagttctggagttctggagatcagctttgatgtacggctgctgagaattgaacttgggtcttcagacttgtgccacgagcacttacttactgagccatccatctccccaggccccggaagagctgctcttgtttgtactagatcatttgcttagaaaaatctccatgaagaccccaggctcagtttctgctcccaggagaaagtcctgctctctagtctgccctgagggccaaacacgggactcttggtgcacctcgtccagttttgtgcagtgctttagcagggccagagagcccatctagtggccagggcagaaccctgtccctggctgcatctggtcttcagctcaggaatgtgagattgtcttgttagtttttgaagtaacaacagttcctgcctagctccaagagtggcgctccctcccactttttgttctgtttcaggtttttttccctgagttgtttgtttgtttggtttggttttggtgttttgttttattttgttggctttttggtttggggggtttatttttggttgggggggttgtttgtttgtttttgtggttttgagatggggtctcaaatgtagcctggctgtttcactctatagatctgatgaactagatgaccttgaactcctggctagtcacctgcctcagctttctgagttctgggattaaaggtgtgtgtcaccacacctagcaggctccacctttttcttacaccctgaccctggagtccatgctccttgtcttgattttcttccagatcctatgaatccactctgtgtgttaacaccaaggaccacagcccattggccagactctcccaaggcttctccgtcgttacagtttaccacagttctgaggcctgtcttttttttttttctttcctgtgtgaggacagactcccttcctccatgtagccttagcttacctagaagttgcaatatagtccaggctcgcctcaaactcacagagatatctgtctacatcccaagtgctaggagtagaggcctgtgctaccacgaccatttccattaacaggtaaggacactgaggcctgaagggttcgtaggcccactaccacttgagattcccatgttgcagaatctcgactgggtttgtgtccaagttcagctggccctcagaatttcactaaggtaggctctcaacagggtggacatctgtatgcaagagtttctgcagctgtggtcctggctgacattggcctgttcctcagttggcatccacacactctcttggcccagggtcttcctctgggccctatccatgggcccttctccgcaccctccagttggaaagagctcttccccttactccaggccccagccttggtgttgctgggcttgcatgctcttgttttacaaccctagcctgcttccttcagccctctcttacccagagaggttttcctgcacttctaaccacctgccttcttggccttggaagcccttgctcccaccctctctcaggctgtgaatggacaggttgcttcagatgctgccctgccctcccctcctcacacggagggtgcctgagtgtgtgcatcctgggcaagcactgggcctccattgtagtctccctggcctgagctgagcctccaccttcccccttccatacagagcagagcctagtacagtgtggagggggtggaggggcataatatggtaatggagaccctgttaattgcttccaaatggccaattgcagccgtttgactaattggtctcttccagctccacctccctgcctggacacctccagacctggccaaagcctgcttaacactgctcccagggcctctgctccggaagttccctcctctgatctctggttcttgggcccacctccagcctttacacctacagagaaactcaggagaggagaggcaagggagagcaccctgtgatatccctgacttgtggccccaaactcattcttgactccaccaccaaaagcaggggaaagagacccattatgcttgctgggtgctgacctggggccactgtacctctgaaatcctaaaagcagcccaaaccaagctcagagaggtgagctaactggctcagcagcacacagatggggggtgggggtgagggccagtctactggagtcacctgtcatctggaggcatctgccctttgtcctcagtaggctaggactgacttaagcatccttcatttgagtccctgggcctttgcctctggtactgcatgggtgctactctaaagcccaggctccagttcagtggagcctttcctgcttgttgtggggaccagccagacaccctccacaggtgcagtggtgcaacatgggagatgaggaaggaccacaccagggtgcaggtggactttttcagccagcctaggaccatgaatggcaatggtgtgtcttcatacacagtacaggtaggttctaagtcccatccacacccacatgaggtagagtgaactctccccaagttcaacggctacatcctgtgggctcttcatcccacatgttccagtagctctgagtagggaagaatgtccctgtccctatggaacttgagcctacatgtgcccaagaacagtaggcgctgctagatagtgactgtatctcttccccaacatgcttgagaaaccttggggtgggttctgccccagatgtagaaatggcagtttgggcaacaggtcagaaggagggtctcattgcccaccctcacagtggcatacttcctccaacaaggccacagctcctaatagtgcttttccctgtggcaagcatattcaaaccaccacagtgcgtgtgttttaaaatttatttttatgtgtacggataccttttgcctgcatgtaggtgtttataccagatatgtgcctggtgtctccctaggccagaagatagtgtcagatctcctagaacaggagctacagacatttgagagccaccatgtgggtcctgggaactgaacccatgtcctctacaagaacagccagtgcttttaaccaatgggccatctctccagtccctttcttagatttgtttgtttttaagacaggatctcaaggccgaggccagcttcagatctactttgtagccttgaccccaggattctgcttccacatctccagggctgacatgcagcaggcctgttctagcacacctggcttctgcacttctcttggccaggcacaggaaggtaactggatccagatgccctctggattcatttgtgatatcttaggagcttaggttggtcttcgagacacagggctgtcccctgtaaagcaggttccatcagtgactccagggttttagcagttcagtggcgtagttttcagactgcttaagatttctcaggggctaggcgtggggcagagaccctgcagaccctggctagaacagaggccctgggagacagttgagggtgctcagctgtggaggacatgtgcattcagcatgctgaagagggcctgctaccctaaatgaggttctcagggtggaaaatgtcccagtgtgtgctagtaatagcttctgtatcgtggaggtccccccaccccaacacttctcaggatctcacatcaacaagggcttcccgccagactcctcccaagagctcaggatcaacttaggaaccaatgttgtgacccatgccacagggtcctgaggcatgcctgagggtagttgctggccaggggaccgttggaagcacaggatgtggggtgggaccttttctgataccccaggaagtccttcttctttgaggcccttggcagataaggaactgaggtcaagagctcagggtccagggagctattccctgaacctggactccccctcagcctgccaggtgggcatgcgggcgccattgtgggatcttctttcccttcggttctgttgccctctgtatctccacattcctccccctctccactgctctcctccttctttctcttcagccaaatctgtcatctgcctcacccacctttatttctgtctctgcctagatttcctgggctctaaggctctgtgactctattgtctctgctcctatctgtgcagtcccctctctggaccaccgctgggacagaccactcccacttaaggtgtgcaaacttcctgtgctaccttctggtcagttaggtagcttcgagcttagagtccctgggccgttgggccacaagactggacgcctgaggaccgctctgcggtgtgagaagcgacctgcacgaacccaaccccgggctccccacgcaccgccctccgcaattgctctggattaggcgccgcctttcatgagcgtttgtcagctagacttccccgcaagttgtttgcgcagacatcagtcatccacagtcccattgtgcacccaggattgatgtaaggcgggagggggtgacagggcctgggggcggttgcctttaggcctcgctctataattttccgaggcataattggtctgggggcgggggcggggcggggacctttcagaggcgggagggggctcagggcgcacggcggaggagcggcggcccgacggctctggcccgggagctgtgcgcaggcgacgcccggcctgagtcccgcgcccccgccagggaccacggccgccttttgttgtcaagcgccctttcttcagaactgtgttcggcaaagaaacacgacccccattcctgggtgaaaattcaaagtcttctttctccatctccctctcctctttcttgtcttctctccactatctcttcccctctcctgctccacccgtccttatctccatctccacctctctccacctctccctgtctcccctcctcttcctccctcccctgtctcccacctcttcccggtccccctctccctcccttcctctcctagccacagtcgagccggcctggcgcgcgggcgtgtgctcccagcgccgcgccttcgtgagacccgcgctggcgcagcagccgctgcgggcgggcgcgatgccgggatgggcctgatctggcttctgctgctcagcttgctggaacccagctggccaactacggggcccgggacgcgactacgacgcgatgcgggcggccgtggtggcgtttacgagcacctcggcggggcgccacggcgccgcaagctctactgcgctaccaagtaccacctccagctgcacccaagcggccgcgtgaacggcagccttgagaacagcgcctatagtgagtgttcaggtccggacagggaggggagggtggcggaagagaccggagggctcggtcccctgccgccacgtcctagatagaggcagagctgaggtcagtccgaagacgccgccgcggtcccagctaccgaactcagcaagctgccccgcccgtcccgctcccccaggagctgcgcgggaggcgaccccggttctgacacgtttctatttctcaatgaaaagccgttggacaaggatttatcgccctctttattgttttgacgaccccggggtgcatggccagtccctttcgttctctttgctctcagccgatgcgcggaggacactccactaggcagagctcggtttccgcaacgcggcatctgacgacaggcttgtcccgcgtcctgcgccctgcaagagagcgcgacaggacaaacaggcgtcccctcgtgttccggatgctgctgacacgcacccacagcccgcagctcgatcatacccagggccagttcccgagtattgcagggtttggcttcttcagttgggtacccacgagcggagctggaccaggagcgttgctcgctgcgtgggagggaggccgcgcaaaactcaccgcgcccggggcgcaggaagccgagcggggggcgcgggcggcgggggggaaccgcagcttcctcctgcaaagccgcagccccgcgggggcgtcctggggactagaccctgtcgggcctggagcgcggggctcctcatgcgcaccactccccatttgctggatcccgggaggtcccagatgtagaggaggggcacattcgctgccacctaggggcactcagtctggtgctcgtctggcgccagctgtagaggcctcatcctgcacccctccaaaccgtggctagggcagaatctcaactgagtccggtaatctggaccatgctgggtcccagcggccgctccctagaaagggagtgaatcctcgacccactatcccgggggtctttgacctccgctcccctcccaaaagcactatactgttcacggcaaaggctggtagaagtttggttgtttttgtattttgtttgttttgtgtgccacagtgagtgtgtggaggtcattgagccactagctggagtctggtctctacttccatcatgtgggttcctcgatcaaactctggtgatcagtctctgcaacttctctgtcatctgcgctgagagattgttaacttttgtacctactcttaggcctgggtgagccctgtcacctttcctcagcacccaggcccttttctgtggcaggctacctctcagcacacatctttggatcacttgctgccagtggggggctgggctgcaaaccctggcttccctaagagtcttggccacctccccttctgggtctccatctgctctggggtttggatctcccaaaccattatgtgtggcttaagttacttgatgcttgcgagaccgaggcattcacaagattgcacaaaatacagactgggtcgatctgtccaggttgcacccaaggtgcatggcaggggcagaacattcccatcatgtcttctcctgaggttaggattaaggtctcccgcacagtggcaggatgcccctttccttaccacctgctcaatgttttcttcctaccaggacttccaaccagacctgtcccagcttcctgagcctagagggggaagctggctcaggctgaggttctgcttaggttgagacgttgatggactcttcctgactctttccaggcatcctggagattactgcggtggaagtgggcgtggtggccatcaaagggctcttttctgggcggtacctggccatgaacaagagaggacggctgtatgcttcggtgagttccattactggtgggcaggtgctgatggaataaccatctggcttgagcatctgattgggggacagaagaggacatgagagatagacttcttagcccccaggtcatgccagactcaagctcgtccagatccctcctgggcttctgagtgcctgcccaacacagactttaggtgctcaggaaaatgccctttccacctgtctgaagtcagtctctttctctaaacgtcgaaatgatggagacaggaagtgagcatggcagcagggtcccaaacctccatggtgtgagtagccaccatagctgcagttgagggagagcaggtcatggcaaacctgccctgcatctgtggaaggaggaaggctggtgcttggcctgttcttctcagggtgggaaggcaacagttgtctggcttagcaggagactggagaaatggctgtcagtctagtactggttgcacagcatgagaacctgagggtctctagcacccatgtatcaaagccaggataaagtgtggtcatcccagggcagggggaggaggcaggatggcttttggggttccccagctaacctagctgaattggcctccacgctcctggatgggcaacaggaggagctcaggggtctccattctcctgacctgaggtgtgacagaaacacactcttgcctgagtgatgggtcttagctgctgcagagctgggctggtgatttccctgactcttagactctgtgtcctgacccactctagtgagtgaactcagctgactttacaatgaacctgactatcccccagaaactctgccttagggtgaggttttgggtacactcaatgacagatctgcccacagggaagaacatgatggggggcatgcctgtgctctcttggcttcaggggagcagggatgatgaggtcaggggtcccactggttggagtagaactttccagataacccatcagggatggtcctacagacttgcagacaggtcccagcttctttcagctgctggctggtgtctaaggcctcttcctgtagacctgtccctgggtgtcctgggtgcgtaatgtggctgcctatgtgctatatccatgggacagtgacattccatagtcaatccccacctcctggaagtcttcgaccacaactgcccacagctccctctactgtaaaagcaggctgaatgaagtcagctcatccttcatgacagtctgtccattcattgtctatcatccatccatccatctatccacccatctactcagcctgccatctatccacccacctacacactcagtcatctacccacacctccatctatacactcgttcatacgtcccaacctatcatccatccatctatccacccatgtaccatccttacacccaattatctaaccactgatacatttatttgtctatccacctacacagtcactcacccacccagcaacatacctagctacccatccacctattacatccacctgcctgttcagccactcaccaacacatccattcatccaccctctgacacaccagctagccagccacctccagcatgctctgtctaccacataccaagcactgagccaagtgcaaggctgcagcaaaaggggatagtggaagcaagtcacttggagcagggcacagacttggacaggttggatagccaagctgcctagacagtggcaggtgtggactgctggtccaggcagccttaggagaaagggaggcattggggagatgtagccccattgacatcatggctccaaggctgttgactgtggcttctgtctcacaggatcactacaacgcagagtgtgagtttgtggaacggatccatgagctgggctacaatacatatgcttcccgcctgtaccgcacagggtccagtgggccaggagctcaacggcaacctggtgcccagagaccttggtacgtgtcggtgaatggcaagggtcggccacgcaggggcttcaagacccgccgcacacaaaagtcctctctcttcctgccccgagtgctgggccacaaggaccatgagatggtgcggctgctgcagagtagccagccacgagccccaggagagggcagccagcccaggcagcggaggcagaagaagcagagcccaagtgatcatggcaagatggagactttgtctaccagggccactccaagcacccagctgcatacaggtggactggctgtggcctgagtggccacctggaaagccctctgagaccaactccagtgggcacccaagattcacttggagccctggcctccccacccttgtctttgggctggctgcttgggggaccaagaacttgcatgccttttacagctttcaaagagcaagtgccagctgctaaggggcttgagtcagagactctggaagactcgaagttcaagatgtatgtggagttacatgagagggaattcttattacaggggtcatcctaatcccggatggagcccagccaatggcagtcagtcctggcaacctgaggcagtggaccgtggagggggctgtgattcacacattaaaggtgtctttctgtcttgctatttaacagctgggatacagacttagcatgccctgaggctccaactgagatattctgtggagggtgaagaaggcagtgatctgcgggcttccctgcaaggtgtcagactggctgtgtcctgagaaagggctgaggtgctacatgcaagcatgtgtttgtgggttcttatgtctgcaaatacccacaagcatgtgtgtagaagggtgttggtgtattcctgagaacatgtgtgtgtgaagcatgcacacaaactggccctgaacttttgacttccaggcctctgcctctctgcgcgcacacacacactcgcactcctgtatatgaagcgtatatgtgtttctctgggaactgtttttatcaggtgaagtacttcctttgttcttgctacccacctccagggctccaggatctccagacagccaaccctaagacaggcccagcttcctctgtatctctgtgatgagaaccttggcatagagctgccctcaccctcgggatagggcttatgttccccggaacgagccaggcacctcaacagctcctggggaggaataggggactgggaagtgtctgttggctaatatttaaaactgacccaacaggagtctgggccacttcggggatctgtcccttgcccttagtcagaggccagtggcttcacactgggcgtgggttgggagggaggcaggaacattcatgtcctgctcagttcctatctaccatttgaccctggttgacacaacacaaccttttctgaaaggttttgctagatgtgagtagcttacagaaggccatgcaggctcagggaaggcaccacgataagccattagtgtcctgatgaagaaatttggctgtaggctgggacacacacacgcacacaagccccatggggaggcacatagacattcagagcattccaccagtgagattccatgtggacctgggggctaagtcagggtgaagcttccacagctaagtggctggaggctgccctaaaagctcaggaggcaccgcaagcaagccttgaaaaaccttacccaccagcttgaccttagacttctggccttcaggctgtgacaatacattcctgctgtttaaagaaccatatggttggtgatgttttgtttgtttctggttcttttgtgttggtgttttttgtttgcggggtgtgtgtgtgtgtgtgtgtgtgtgtgtgtgtgtgtgtgtgtgtgttgcagtgctagagataagatctgaggtctagaacataccacacaggccattgaaccacaccccaaggcagctgtgacatttttgccagcttccctagcaccatagtaccaggtattgggtaaccctaaaaagaagaccccgtaatgcaggaaggtggggggggggagcaggtcaactcccagactcaaagtcatccaaggaaaattctggatctttgtgagttcaaggctagcctggcctatatagagaattccagaccttccagggttctgttgagagactctatcttaattttttaaaaaaatctaaggaggaaagaggaagatactagcctggtaccactggcctccatgtacacacacgtgagcacacacacacacacacacacataaatgcatataccacacacacagggagaaagaaaaagggagggaagagacagagggagagagagagagaagagagagagaattttagaatttcaatctctccaagatgggcatcagcacctctttggcccctgcccttttaccttatgacccccgacccttgctcaccttcaccactagagccatgtttgttcccaaactcctttgcacgtgccaagggcactattcttccctctgtttgtccccagattacccacttctcaacattcacttctgagtgcactgggctgtttaatcactgagtccctggaacttctgctctgtgcctccaagcctggagcttgtgacatgattgaaatacttactcataaacagtgggggtaaaggtgccacagactaggctactgcttgctgtcactagaggtgagaaaacctgctcagagagtggtatgtggttttcctgaggccacacagcccgtgaaagacctactgggcaagatctggggactctaaagcctgtcctgctacctgcatggtgccaggaggaagacaagggagcagagcctagtggcaagagcctgtggctgcgtgtgctgctgtaaactcccaatcctaacgctggggtaaaaggcagagacagggggctggtgagatggctcagtgggtaagagcacccgactgctctcccgaaggtccggagttcaaatcccagcaaccacatggtggctcacaaccatctgtaacaagatctgactccctcttctggagtgtctgaagacagctacagtgtacttacatataataaataaataaatctttaaaaaaaaaaaaaaggcagagacaggaggatctttgtgagttcaaggctaatctggcctacatagtgaggctcaggttagctggggctgtatagaaagaccctgtttcaaaaacaaaacaggagaggaaaacaaacaaacaaacatgagctgcatgagactccgaggtcaccccaaaactgtgccaggagacaagatacaaatataaacaccagcagtgcctacaacagggaaccgggagactgtaagagggtggggccctttccaggtgaagaaaatgttctagaaagggcatcagtgacagggcagcatgctccatataaactcatcaaggtcacaacttagacagagggactgtgcaggctgttttgatggggacctgatgctgggactcgagcccaggttggtctgaaacttttggccatcctcctgcctccaactccagagtatcaggannnnnnnnnnnnnnnnnnnnnnnnnnnnnnnnnnnnnnnnnnnnnnnnnnnnnnnnnnnnnnnnnnnnnnnnnnnnnnnnnnnnnnnnnnnnnnnnnnnnnnnnnnnnnnnnnnnnnnnnnnnnnnnnnnnnnnnnnnnnnnnnnnnnnnnnnnnnnnnnnnnnnnnnnnnnnnnnnnnnnnnnnnnnnnnnnnnnnnnnnnnnnnnnnnnnnnnnnnnnnnnnnnnnnnnnnnnnnnnnnnnnnnnnnnnnnnnnnnnnnnnnnnnnnnnnnnnnnnnnnnnnnnnnnnnnnnnnnnnnnnnnnnnnnnnnnnnnnnnnnnnnnnnnnnnnnnnnnnnnnnnnnnnnnnnnnnnnnnnnnnnnnnnnnnnnnnnnnnnnnnnnnnnnnnnnnnnnnnnnnnnnnnnnnnnnnnnnnnnnnnnnnnnnnnnnnnnnnnnnnnnnnnnnnnnnnnnnnnnnnnnnnnnnnnnnnnnnnnnnnnnnnnnnnnnnnnnnnnnnnnnnnnnnnnnnnnnnnnnnnnnnnnnnnnnnnnnnnnnnnnnnnnnnnnnnnnnnnnnnnnnnnnnnnnnnnnnnnnnnnnnnnnnnnnnnnnnnnnnnnnnnnnnnnnnnnnnnnnnnnnnnnnnnnnnnnnnnnnnnnnnnnnnnnnnnnnnnnnnnnnnnnnnnnnnnnnnnnnnnnnnnnnnnnnnnnnnnnnnnnnnnnnnnnnnnnnnnnnnnnnnnnnnnnnnnnnnnnnnnnnnnnnnnnnnnnnnnnnnnnnnnnnnnnnnnnnnnnnnnnnnnnnnnnnnnnnnnnnnnnnnnnnnnnnnnnnnnnnnnnnnnnnnnnnnnnnnnnnnnnnnnnnnnnnnnnnnnnnnnnnnnnnnnnnnnnnnnnnnnnnnnnnnnnnnnnnnnnnnnnnnnnnnnnnnnnnnnnnnnnnnnnnnnnnnnnnnnnnnnnnnnnnnnnnnnnnnnnnnnnnnnnnnnnnnnnnnnnnnnnnnnnnnnnnnnnnnnnnnnnnnnnnnnnnnnnnnnnnnnnnnnnnnnnnnnnnnnnnnnnnnnnnnnnnnnnnnnnnnnnnnnnnnnnnnnnnnnnnnnnnnnnnnnnnnnnnnnnnnactgtaagaagggtggggccctttccaggtgaagaaaatgttctagaaagggcatcagtgacagggcagcatgctccatataaactcatcaaggtcacaacttagacagagggactgtgcaggctgttttgatggggacctgatgctgggactcgagcccaggttggtctgaaacttttggccatcctcctgcctccaactccagagtatcaggatgataggggtgagccctcatgcctggccaagttgagcgcttccagagttgcatctggataggtctgatgtaattgtagggactcccaggtcttcctgtgacagttctgtgggtcaggaccaccccatacagtactactcccttccagcaggtggcagtggtctcggggatgagctcaggtgtggagctagctgggggtgttactgttttcaggcgaggacactgaggtctttgcaggtgatggctacctgggtgagtcatggctggtcaccccaacaggctcaggattacccacgatggcacagacacaggagtaggacctggcagggcagatgctggagccaggagaaccaggtcagggatacagcaggggtccactcttgcccatacctcaaggtggtggctgaacttggaagaacagtggggctggaaacattttccacgctatgctgtggtggctgactacttcagtttccccggtgggacaaaaggggaactgaggcccaaagaagagaggctgcttgcttggaagtggggaaggcagggctacggtcaggcccactgtgggctctaggcccctgctggctcacagtgtctcctatggtgctcagtttcctgtcttggacactgacaagcatgtctggtcaagcatggtggtacaggcctattgtttcaagactgaagactcaggaggctgaggcaggagaatgagtttgaggtcaacttggacagcaaagtgaaatctgtctccaaccaacaaccaacatggctctaaaagacagccccctacccaggttgtgctccccagatggctctggatatagtgccagtgccccgaactgcttggcaatggttgccagccttcctagccaggaacccctactttattttaatttattatttatctatttacttttataagtacccttagccaataaaccatccctctagtccctgtttgttttgttttttttttaaagacagggtctcaccatgtagccctggctggcctggaacttgctacacagatctggctagcctcaaactcacagagatcccctgcctctgcctcccaagtactgggattaaaggagtgagctgccacacccagatatgaatccctatttaagcataccctaatgctcatgaactcagtgggcagatgaagagtttttgtgtgaactggggctttgcccttatcatcctgtgtgttctcctggtgaccctcaagcttggctgcaatgatccccacttacagatgagtacactgaggcattggataggctctggcagaaggctggatctgagagacccagaggtaagactgctccatacccattagggcccagaacattcctacctttttcctctatatttgttgtgtgatatctgctcagctgtggcacaaaacggctgcttaagtcaagctttcttggtgtattgcatttctgagcctaccagggtgatgctgtgactgctggcactgtggccacctccagcattagatgaagctgtctccagatggtggggtaggcctgctcgctgccacagataatactctgctttcccaccctccactaagcaccagctccatgcaccctggagggtgccagagggaagggcagagcagtgtggcccacaccatccagacatcagcaagagaggtaaaaccaaaagatgcttttaaagtaacatggcagggacaacagatgatgctctgaccaagaccatgggggttgggggtggaagtggacagcatccaggctgagacccaaaggacaagaagacacaatgagccaggcagtggtggtacacgcctttaatcccagcacttgggaggcagagacaggcctgatttctgagtttgaggccagcctggtctacagagtgagttccaagagagccagggctacacagagaaaccttatctcgaaaaaccaaaaagaagacacatacaaaggccctgggggttgaggggaagacctggcaacaagctgcaaggcccgatcatggtctcagcattttgtccccagtttggctgaggctaggtacagagcttactccacaccatgctccccacacgctgcctgctcttactgctttcctcgctgctgcagatcaaaggaacatgaacaccaacaggatttgccttttgagccccagagccctgctgagggtctgcaggattatgggtgatgtgctgggtctcactgtgtatcccaggctggctttgaactaactctcgaagtaatcctcctgcctcagctttccgaggcggtgattgtggcagatgtgaacttggttggctttcctgtgccagcaacacatcttattggctgacatggtattagtatagttcgcctgtgaccagtctcagtatgcctcagtttctctgttcactgaacagttccctgttcactcccccacaacctatgaggtgggcaaagcccaaatggagagtcacacctttcatctaggcactctggcggggtaagcaggaggatccagccagtgccaccctactttatacagtgaatctgaggacagcatgggctggctacccgagacctatttttaggttgaaaaataggatcagcaagggtatggagaggaggcccagtaaaaaaagggcgcagagttcctagcaccagggaagagtagctcacaatgacctgtaactccagctccagggaatccaataccttctggcctgtgcagacacctgaatacctgtgcgcatacatgcacacaaacacgcacacatacatatcagcaaaaataataaaatcttttttttttctttttttggtttttcgagacagggtttctctgtgtaatcctggctgtcctggaactcactctgtagaccaggctagcctcgaactcagaaatccgcctgcctctgcccccccaagtgctgggattaaaggcatgtgccaccacatctggctttttttttttaataaaatctttaaaagtaaatacatggcagagcagccagtgtttgttgaatgcctaagtcaatgtttgcatccaatgttccccagattctcaatctgataccatcgcaagcccaagacacaaaagacaatgatctcaggcctccttgtgtgtagggggctatcccaaccgattgccatcctggggggggggtgtctttaaggctcacagagctaggacaggttgccgagagctcatgcctaccccaggtcagtcccacataagtcgatgttaatgaagaggccagaatatgaagagaggtggctacgatgtctctgcctgcactaagaaaggctggacgttgtccaggaccaggtcagcaatgattgacatcttaacaaactctagagccttagatggagtaatgttgtgttgggggaacctggctctctgatctcaggggatcctggtccatctctgagacagacacttttgtccacagacagagcttcacaagtgacccacacacgggtgaccagctgggcaactctggcaccccttctggctgccccggtgatttcccaaggatgcaggaggggctgtgtagctgaacgtcctctgagagccattacagccaaccaggctttattttggcttttacaataggtttgctgtcaggatttccatgagtctctcagagctccagatgctgggtctgtatttaactcaaatgagtggcagagaagccactggcctgggcaacctggttcctggggtgggaggtgacccctaggcttggagcagctattttagaggtggctgccatttggtctttgccaaaatagttgaaagaagacccccaaaatagcatccgggtctgccctggcttagacggcatcacatgcaggcttagagcaggcgtgtggcctgtcagcaaacaggcagcagagactgcttgtcacccaggccaggggcctaggaatggcctttgggctgcctcacaggaccagtgtccctagccctgcagggtgacatcatggaggaggaagcatagaagagctgaccaggtcctgagaacccaaggagctggggccaggccagatgtccttagaggcccccaggctttgtggagcctaggtagtttccttctttttagatcatggttctggggaaggagaacataacccttcccttaaggggacagaaaggtcaggacctcactcaaggtgtgaggtggagtgtctgtcacctagcaaggctccttgagtctctgaggttccagtgaaggcagggcagtacggtgcccagggcccggggaaagccagtttcaagccagattctggaagatattttttctttttttaaatttgtttcttaaagtttggtttagtctgttgtttctttgaaacagggtctcactctgtagactaggctggtcgagaaccacaaagatcctcctgcctctgcctcctgagcactggaatcaaaggtgtgcaccaccatcactccatctacctataactttaatccgagcacttgagaggcagaggcaggcacatttatgagttccaggacagccaaggctacacagagataccctgtctcaaaaacccaaccaaccaaccaaccaaccaaacaaacaaacaaacaaggtacaggccactgcagcaggtcatatgtgcaggcataggcatagtgaaggcagatgtccccagagtccaaaagaggtagttggcatccctgaaactatagtgacctttgtgagctgtcatttaatgtaggtgctgggaatctgacttcgatcttctgcaagaaccacagagcaagtaacaactaacccatctctgtagctctctagagggacttttccagaacaggtgtggcttagtgaggccccactttgccaaatttactcagatcctgcctccaagataccagactggccctgcactagcaagtgttccctcccctctgaatgccagtcccctcctcaccaggaggggccgtaaggttgctggatcaatgggccaatgaccctggcatggatggctgagtcacccggtaagtctctgagctggatgacagatcaccaggtaaactgaggcccggaaggaccaggtgtctatggagccctcctcccatgagctgtgaacatacttggcccttgggctgctcctagggatattggtgcaagaggcaaaagcagggaaatgggcaggtgaccttgagctgttccaaggctcccacacagagcactcaacccggccccagaagagcttttgtgatggggctctggaggacttctcctagtctcctgcggtgagcctgcccaagggcaggtcagtctcttcccagaggtgaaggtgggatgaagccaggaagggaaggttctccagccccacctgctgttgctgagcagggcccacaccttctactgtcgggagactgaacagagatataccctgaggggctttggagagaatggctgtaggcttaggagttcccttttctccactctccc

SEQ ID NO: 640 - DNA, 738 bp, Mus musculus
atgggcctgatctggcttctgctgctcagcttgctggaacccagctggccaactacggggcccgggacgcgactacgacgcgatgcgggcggccgtggtggcgtttacgagcacctcggcggggcgccacggcgccgcaagctctactgcgctaccaagtaccacctccagctgcacccaagcggccgcgtgaacggcagccttgagaacagcgcctatagcatcctggagattactgcggtggaagtgggcgtggtggccatcaaagggctcttttctgggcggtacctggccatgaacaagagaggacggctgtatgcttcggatcactacaacgcagagtgtgagtttgtggaacggatccatgagctgggctacaatacatatgcttcccgcctgtaccgcacagggtccagtgggccaggagctcaacggcaacctggtgcccagagaccttggtacgtgtcggtgaatggcaagggtcggccacgcaggggcttcaagacccgccgcacacaaaagtcctctctcttcctgccccgagtgctgggccacaaggaccatgagatggtgcggctgctgcagagtagccagccacgagccccaggagagggcagccagcccaggcagcggaggcagaagaagcagagcccaagtgatcatggcaagatggagactttgtctaccagggccactccaagcacccagctgcatacaggtggactggctgtggcctga

SEQ ID NO: 641 - protein, 241 aa, Mus musculus
MGLIWLLLLSLLEPSWPTTGPGTRLRRDAGGRGGVYEHLGGAPRRRKLYCATKYHLQLHPSGRVNGSLENSAYSIITAVEVGVVAIKGLFSGRYLAMNKRGRLYASDHYNAECEFVERIHELGYNTYASRLYRTGSSGPGAQRQPGAQRPWYVSVNGKGRPRRGFKTRRTQKSSLFLPRVLGHKDHEMVRLLQSSQPRAPGEGSQPRQRRQKKQSPSDHGKMLSTRATPSTQLHTGGLAVA

SEQ ID NO: 642 - DNA, 29340 bp, Homo sapiens
tgtattgaaaagctcatcagcagcggtagaggtgcagctgagaaaatgtcagtttcacaaaagcacctgcctagccagtgggcggggaccttgccgtggggcgaagtccaggcccagtggcctggggctttctctttggcttttcctgggagctccattctaggggactcatgctctccaaactcctttgtcagtcccacactcacagtaggggcggtaggacgaggccttggaccctcagaagaattcttttctagtcctgttctggtttggccaaagcctgaggccccagcaccctggagacaggtaggtgcaggccctgcaggtcaggcagagaaagggttaaggctgctgcagtggggctgggggagccatggctgtcagtttgcaggcaggtgtgggacagggcctaggcaggctctttccctgggtgacaggcaggcaagatcaaaagctgttgggacaaaaggggctgaggtgaattgtcctggccaaaggcagggcactctgggacagtgtgcagcccagtcaggcctcagacatgcaccccagaagaacccccaccctgacagcaagcaccatgtgggggtcaaaggtcggggtgtttggcttggattacggtgcctgcctttcacccagagcaagaaagccagagagcaggataagaaccttccggattggaactgccaggaaaggctcctctgtgagccacggctaatgaaaatgtcattgtggctcagagacattctttacatttgtgtgcatgtccccaagagagacacacggcacctctaaataacccggtaaggagattcgccaaggaacagccaagccagcgttttccgccagcctaatgacggccccaatgagttcagcctttgttgtataatctgttgctaaaaggatttaaaattcaagaaagaaaaatgttagggccaattagctacgttgtgcaggcctcgatgtctatgtgggccccaagctcctctcttgaagtcaagtgggggctttgcttaagcccgtctgcccatcagaccccaagctggacccaattgatctttcagagtcagattttgttgtgtaacatggcgtgggagagaaggtctaggagctcagggcaggggccccgagaaatccttcccagttcactacttacgctaccgacacacagggaaaaggaaggcttttatttctcccaagatgtcagtttaaaatacatctccaggccgggcgcggtggcttaggtctgtaatcccaacactctgaggccaagacaggaggattgcttgagcccagaagttcaagatcaacctgtgcaacatagcaagaccccgtctcttaaaaacaattttaatttaatttaaaaaataaataaaataaatctccagggtggccccacattgttctggcatttctgctcagaggtctgtgctgatgacggcaaaacatgatgatgacggccatggtgtcaaattccactggacatgaatccagctgcacggtccccacactatgagcccttgcctgggcttcagccttcacatccgttcctgggtagagctgacgccagaggagagagagatcacatactgaggacagtcctggtctcttgtagtcctgtctgggccttgcagtgaacaccctgcacaccaactggcttattcgtcaccaaaggaatccctatttgcagtaaaaatcaagtcaatagcaaaattagtaccaaaggctcaaagagaaaagttctccctctcacctctttgtatccttacttcccagaggtggtcattcctaccactgcttgcctatcttgcagaagggccctgtgtataaatcacatgtgtgggctgggcacagtggcttacacctgtaatcccagaactttgggaggctgaggcgggtggatcacctggggtaaggagttcgagaccagcctgaccaacatggagaaacccatcctctactaaaaatacaaaaattatctaggcgtggtggtgcatgcctgtaatcccagctactcgggagactgaggcagaagaactgctctaatctgggaggcggaggttgcagtgagcagagatcatgccactgcactccagcctgggcaacagagctatactctgtctaaaaaaaaaaaaatcacatgtgtgaataccaacaacagcagcaagcactgatctggtgtgtcctgctcgccggacactgtcccagctcttcacccatatggattcatgttggccttctgagagcactgtggcacgttcccattttacagatgaggacatcgaggcccagagaggttactatgcccaagtcctcacaggtcatacatggcagaatctggattctaacccagcaactcacacatgggagggcactctggttgctaccgtgttgtttcccttcctggccaccctgatcacgactccggctgtctgctgtctcgaaagcttcacagcgcacccttgtatggccaccagtctctgacgggagggttctttctggtctgaaatcctgctgaatgatgctgcttgtgcatatttctttatagactctgtaagataaagtgtcagagtgtcaggtgtggcattcctcaagcaaaaggcattgtgatggacactgtcatagtcacggcccagtgccccctgtgatgatggccctggtttgcacgtcccctcacccccatctctgcagagacaggctcaaggcccattctcggtctttttagttgccctgatggttttatctattggttgaactcgttcaagtttgagaagtgcctggaattagctctgtgcttccgaggagttctttcgtgggcgattttctagtctatcatttttctggagttcaccaaatcaaattttgcagaaagcctccggcatccctactgaaaggtctccaagtgggtcatgccaccctgccagggggtgagaggggatgaggctgcttgtccccggccaccctctccctctttgtcgggatctatgtaaggacctttctctctccatgttttcactcaaatgacggacattttcaggtcagggatgccacagaggtttcatgcaattgttcctgaagcatctcagggactctgggccaagccctggggaggggccaggaggaaagcagactccgtccacctgctccagagctcacagccgagggctgggggtggcctcacagacgcctcttgatgaggaaggtgactgtgcagtgcaggaggctgagggagccgggaggaggaccctggcccagccagggcaagggggtttaaggacccctccaaccccgaggagagactctcttagctgcatctggaaggacaggaggaatctaaacaagccaaaggtttggaggaggagagggagcagtagctgcaggcagtggtaacagtccgtgcagagaccccagagtggggaggagccggtgctcactgggaatgtccgggtcacagcagctgctcaaggccaagggtgggccaggaggagctgaagagatggacagggcccagaccatgcccaaatccaagcaaagagcatgggcttcaccccagagatgaggggctgcagccctgcctcagaaaacagaaggacgcagcacactcacggtgactcacccccatgtggctggaggcgagggagcctcctgaggcagggccagggcagccgtcaggtgggtgacggcaggggtcttgccatggtgggcacaggggctgcatacagcttactcagtgacaatcgagtccctggtgccagcctctggaagtctggaagtgagcaatgtttcccattaaggaaagtgtgtggccggccatgccccccaacgttgcacactcactgcctttgcagggttggggcttccagtcacagggtcccatccacgtaccagcccaggtggctgcagaaggtccctcgcagtcatgaaaccaagggaggcttgggaaaccacatctgaagggcatggctttgatttagtgagagggtggggctgggctgggcaaggccaccaggtctgagtcagagccagaggcaggaagctggtccccaggcactgcccgccgcctctgcgatgcagtcctcctggccacctgagaacagcctgtagagaggcagtggcgtctttcggacttcctcgagagtccctgcagcttgggcattgatggccagtcaccggggctgcaggaccctgagctcacacaggcccggccgggccaggccaggacttggccccagaaaatccctccctggaaatttcttgggagttatctcagctcttcggccccttcctcagctcagggaaacaggtcagagcacgctcagtcctgatgctagaagtggggtgcacgctcagtcctggtgttgggactggggtgcgctactctgggacttgagaaaaagtcctgcttgtcctttaaacttagaataggggttgggcacagtggctcatgctggttgtcctagtgctttgggaggctgagatgggaggatcgcttgagctcaggagtttgagaccagtctgggcaacatagtgagaccccatctctacaaaaaatacaaaaatcagctggatatggtggcacatgcctgtagtctcagctacttgggaggctgaggcaggaggatcacttgagcctgggaggtggaggttgtagtgagccaaactctagccactgcactccaccctggatgacagagtgagacccggcctcaaaaaaaatccagtaacttggaattgatatcagaggctgacagctgtaggagcgcttatgcagggtaaggaatagagcagaaaatggaatctgggtggtcctggacccatgtgccaccacccccaagatagaccatgcataccagggcccatcagtccatcgatgctggctcctgtgattgtatttgtagcactcctcagcctcccccagttgtaggcggctgaatgaaggccccagcagcgcagcccctttttcctagcagacacaggagcctcaaagcagcaccgtgatggtttaaggagaacacagaacatgcaggtgtggaggaggaacatcctagactgggagtgggtagcccggcactcctccctctatccccacctcaccatccctgcctcctgcccactgtccaagtgtcctggccacatctcgcacaggtcagcacaggggagaggtaaacaaagcctgcctgccctctagagcaagctgccctgcctgagctgctgctgacgagaaacaggcctaggtatcagggcagcatggaaggagcaaaggccagggaggccagaggaagagactcgctctgcctggggtgtgggcccctccaggggccggggccaggtctgcaggaatggcaggagcttctagatggaaagggtgaaagggcccccaggtggagggactggcctgggcaaagggtggagaggggtaggggggtgcaaggcagggacacagggtgattgcttgagtgtgggtttgccaccacagctccccatcaaagctgccacagctccccatcaagcctggcctcgcccagctgcagttgacttcatggtgggaggaggtggggatgtgaatttcttcccttccctccaccccacctcatccacaggactgggggtgtacctcatcatttgcacttgttttgggcggaactgtgtcccccaagatttgtatgttggaaccctactcactaggacctcagaatgtggctgcaattggagctagggtctttcaaaggcgattaaagtaaagcgaggtctgtggaatggccccagtccaatctgactggggtccttataagaagaggtaatgaggacacaggcacacacagagggacgaacctgtgaggacacagggagaagatggcatctacaagccctgttggctgctctgcctggagcccgatgccaggcactgacaggcacaggctgccctcggtgttgtggggaagaaaaagagcagctggaggtgtctgtccctgggccagggggccctctgctccctcctctcctctacccagagagaatccctcctttatgtctcagcttggggctccaaaatagccaagtagccaggaaataaggcgaacatccatccatggatgaaaaataaacagcatgtggtctgtgcacacgacggaatgccactagggcagaaaaggggaggacacactggcacacgccacaccgtggatgagcctcaaagtgctgcgcaggccccactgcggggagatgtgccttccatcccacccctgcctgcgggggctcctaactttgccagaagcaaagtgccagctttgccccagagggacttagaggggcaatggtttccctctccccactgctcgggtcctgggtcccgtagccagaaggggcattccagtcttctcgcctcatctcctggctgtgtgaccccgggcaagtcacttcacctctctgagcctccctttctcatctgtaatgtggggctgatcagggctgctcccagaatttcagggacccatggtctcccagtgacacaggcaggctgggtctctctcccactgctcttggggacaaggatggggtaagaggatgggggggcaggcaacataattagagtgagtttggggctgggagtcagcatcacatctgacagtccctggccagccacctgcggccacaccataggaccctgttctctgccctctctccaccccagctctctctccaggggaagaggctaggggcagactcaggtaccagatagggctgggggtgctctgggggacagggtcccagtgcagaggttcgggggatgctggtaggagcacttctgctgggcctggggtgtccagcctgggctctggaagagaccaattagtcaaatgactacagttgaccatttggaagcaattaacagggtcgctattagcgcatggtgcaccccccgcctggctccgaatgggagggagaggggcgaggttgccattatgtgggtgcctctgccccaccccacacacaagactttgtggcccagccccctgcccctgccgggcagatgtggaggaatcaggttcccctcccttggctgggcctgagggtcccagagtcccagggtgggggtctggggggcttcctgggctggaaagatcaacaggtttagatgaggaggaagaactcaataggtgggtgagcaagggcctggaggcgcagcccagaagatgtgggaagtgaactagaggtccacgcgggtgggtgagcatccccagggttcccccaacactacggcatttgtcagaggggctggggcagctggagaaggcagctttgggctccagaccacttcccgtgactgcagggtggaccgcagatggaaggaccgggctgaaggctgtcgccagcgaccggaggagagaggaaaacttggcccagagagcttggctgcctcggaaaagtcatgcttaccagaacagcagacagtgagccagggccaccaggagggacctcaggcagggcaccggctgtcctggtataactgcaaattgcgccctctttcactctcaaaggcagcagggtttgcgtcataaactgtggtcccctgcggctggagcatgccctgcgctgatgggaggccagaggctttgcagaggtaatgccactcagtttccggccctacctttggggcatcacacacatgagaaaccagtatctcaggagcgacactacacagccaaggcctcgtggcaggaagtggccgagccattcattcattttaggagtatgcactgagtggctggtgtgtcaggttctccctaggagctggaaacctcttgcccatcccctgagcttccctcctatagaggggtcacctttggactcctgcttcagggcagcagcccctgccctcatcttgggttctcgggcacacggcaacctggcagtgggcagggctggagaccagagcccgggagtttccctgggaactgctgggggccccaggtgtagagcaggaggggcatggacacccagattgccttggtcagatttttctggctcctcccagtcctccagagggggtcctgccaaggaggcagccggagccttgacaggaaagggcatcggaagtcccctggccccagcaggctgctcttgctctctctctcttaaaacattattgtgtcctctctcctctctctgtcagactgtgccccctgactgcacccctctctgaatttcttgtgcaccccccacccccgccactacatctcctctcttcttggccaggtgtcaggaggtagcagagctaaggcatttagagcagcgacctccttcctgtgcctcttccatgcctcttagggagcccaggtgaccacacatcccagcccaggcctgcacagggctgcactggacaagctctcctcttgctgctgtcctttggggctttcctgtcaccagcctctgacccctgtaacacagtctccatcaagagtctgaggctccagtagttcagtggctggcctctggcctgttcaaggactctcacaagctggccctggggcagcggctaggagaccctgactaagactgaggtgctcggggatggcttgggggcgccctccttcaggatggccacctggaccctgtgcacgctggagtgggctcacagaggacacactgccctgtgtgtattgggccatgggagctggacacgtcccaggggtgtgtgctcactgccacagctcatggtgccctgcacacttgcctgaccccaaaccctgatgcagatggcaggctggggaatgtcagcccacccaactcaccccagagcccctggtcaacttggagccaaagctgtggcctagacccctggactccacagcgtgccctcctctggggcagggttgagagaagcaaatcccctgtgctggcccctgcttcctgctggccccaggaccctgggggacagaggaccaggaagcaagagaaatgggtggggacatggcttttcccgatactttttgaagcccctcttcactgggccccctgagatacaccttgacccccacacagtccaggggaccacctgggcatctgcactgattcagatcctccaggccaggactcccccacacccattcccagcttctaccgggttcctcttgtcatcacccacccgctgtggctaccagactccctgtgcttttctctgggtgttctccgcggctctgtcttctttccatctcccctgcctcctctttttggcgatctctgtcattcacattttccatgtctttcccgtcctttcctcctccgtttctgtctgtctctatctgcatctctttctctctagggctgtctgtcggcgcccacttctctggctctcgcgtccctcctcccgcctccccaggcccctctctggaccgtcactgggacgggatcctccgaggcctgccagacgagagctaaccccaccactccgggtgcccagttggtgtgcgcaaaaggagatagcatctccagacccggcctgccccgcgccttgcaaggctgaggacagcgccactgctcctgcaggaagcgccgggcgcagacacaaacccggagctccccacgcgtgcccgcgccccggagcctccccgccgccgccctccgcggtccccttcattatgcgccgcctttaatgggcgtttgtcagctcgacttccccgcaagttgttttcacggacatcagtcatcggcggcggccccattgtgcagggggattgatggggagcgggagggggtgacagggcctggggcggcctcctcaaggcctcggtctataattttcggaggcataattggtctgggggagggggcgggggaggggcgggtaggggacctttcagagccaggagggctttcgggggcgtggggcgcgctgcggagcggagccgcggctcgacggcggtgcgctggcggcgagtgtatgcagacggcgcccggcccgaaccccgagccccgcggggctccccacccgccggcctcccgcccctcccgcgcctccgcctggggaccacgtcggccttttgttggcgaaccgtcctttctttcagcgctttgcgcagcaacggaaatttcattgctcctgggtggaaattaaagggactcgcgttccctctctccctctccctctcccactctccctctctttctctctctcgcccacccttcccccttcttcccccacctttcccgcgaagccggagtcagcatctccaggcgcgggatcccgctccgagcacctcgcagctgtccggctgccgccccttccatgggcgccgcgctcgcctgcagccgccgccgccgcggggcgggcgcgatgccacgatgggcctaatctggctgctactgctcagcctgctggagcccggctggcccgcagcgggccctggggcgcggttgcggcgcgatgcgggcggccgtggcggcgtctacgagcaccttggcggggcgccccggcgccgcaagctctactgcgccacgaagtaccacctccagctgcacccgagcggccgcgtcaacggcagcctggagaacagcgcctacagtgagtgccggacgctgcggggccccgggggaagcggcgccgggaggggtcgggcccgggagaaggcgcgctgcggggccccgcgggggaggcggcgccggggaggggtctggcccgggagaaggcatggtgcgcccggggtgtccgggaaaagaccgtctgcctcccgctgccagaaggggaatgccagggtgccctcctcaacctacacgtccgggagaagagcgcgcgctggggttcgagcagaactcgggggcatgggcgttcacgtccgaagagggcgccggcggctgtcagagtccgtccccggtccggcccgctggtctgaggggacgcgagctaggcgaccccggggctccaggctctgctgctttgggcagctctgacaagtttaagccctttgaatgtgtcggagaaaaggagccggacaaggcatttatcatcttctttattattttgacgacttctcctcctcctgccgacccctggacgccccgccgtcccctccgccctccccgctcgcggctgcccaggtggccgcccccgctgctgcctctgcgcggaggactcttgccctgcggagctcggttccctggccgcggccgccaccgacagttattccccgcgctggaatctgcacctcccccgcctccgccctggccgcacagcgacaggagggtggaggccctcgccgtcgggacgtgcggatcacgagcgcggaacggtgtccgcccgggcctgggggtgcagacacacacactccggcccccgcacgcaggacccgcggcccgggctgcgctcaccgcgggagtctgccggactacacggttgggctcctctggtcacagggacctgaggcccgcgccgagccctttgaggagcaggatagcggagctcagggcccgggaggaccgcgtggggagcgtgggagggcagtcaagaccacagctgtcctcgggtgctccgcgcggcgctcggctccggccccgggcgcaggaagcggttccgccgcttgaaggtggcggcggcggcctcagcaaaccgcggcttcctccaggaaagccgcagccctgagagggcgtcctggggacatgcgcctccggagccgcacggtgggcaccagctgtcaccagggggtccgagtgcgcggaattcgtctcactaagacactccggttctctccaaagccaggctccccctcggagtcgcacagcatccaaacttcttggtgtaggctgctcacggggaggggagggcgcgcgcccgcagccgcccctgtcctgcgtcgagactcgtgcttcgctggtccccggtcaggcaccgccgatgccgcccagcctgcgcactgggaaggcgggaggctcgcagcctgcaccacagcacccctgggctggagcaaaagcccggtggtgaccgcgtctgtgctcggaccgcgtgccaggagggcgctcctgagaggcatgccttggagagggtgcaggcagtcgccccaatcccctcgcagcctctattgggagacaatgaccccaacccgtcctttgatgtagtcccccgcccccagcccccaccacagcactcgtgtatccagaaggaaaggcgggaggggagatttaaactttcttatccctggggagtgggtgagacccgtccagcttccctctgcgggctccagggtctaaactggcttcctgcccttccaggtcccccggcgagtacaatgatctcccgccaggtctattgccagcatgatttgggtggcaggcaccctggctgtgttattgccagtggtttatattatcagcctggctcatcagggcccagctttcccgctggcaggcacaggcattggggaccgtgcagtcccagagctcagactcccatggctgccgccagggcttgatttcccgctcaagcacatgtgcaggggcctgacagtcacccagccatagtggtccccacttgcttgtctgtcggatgatgatggcagctggcaaggtgttgtgaggctcgaatgaaagccagggtgcaggcagcgtcagcaggtgggaatgttaatttcattgttaccctcccaagtttgaatgaagagaagccttccctgatgttcccttctctacctcctgtccggtgacttctcccttcctgaacttccactcactccccgacctgtggggtgtgtgctaccctccccagccctgagcccggggtgtggctttgggcagggccagctgggcctcagccgccccctccgtgggggcggcgggagtgaggcacctctcatttcttctaggtattttggagataacggcagtggaggtgggcattgtggccatcaggggtctcttctccgggcggtacctggccatgaacaagaggggacgactctatgcttcggtgagtccaggctgtcacgtgggtgggcgctgacggagtagcggtctggcctgcacatcaagccaggggacgggggatgtgggcagtagaatgctttgccaagggtacacgggacccaagctaggaccagaccctggcccagggctccacgcccagtgatctttggctgtgtctgttagaggctgctccgcgagtgacctggagcctggccctgggggacctgggatctggagaatgccaggttagcaaaggtttcccccatccttgtcatcactaccaccctcccttgagagtagctgagagcagggaagtgattgttctccaaatttccaccaaaataaatggacccaagacaacctgggagtgttccttggggcagccagagctctcctgggagcatggagaggaggacgctggcccagctccaccggctctctccaagggtggaaaggcgagagctgaagcctaggaggggaagggggatggcgcccatgtcccgggcacacaggagccttggagccctggcttgggacccagtctatctactgcctgggcctccgtgtaaccaaaaagggtctccttactctgtgggtatggcagcgcccctcttcataaggggtaggggtggggaatacacagagtaaaatacatgtcacagggaaatttgctacctccaactagtcattacatgcaatttggctgatacttccttgggcaatgagaggttttccatccatgagtagcctggctgacgcggcccaaggacaatctccctgcagtgagctctctgctcagtcctgctcacagaggacacatcccgcagctccctctcgcagaagctgatgatttcatcacagatttttagccgttttgctaaaggaaggtccagaaagccgggatgcgccccttcattttctctggtccagaggctactccctccttcctcccatccactcacccatccacccatccacccattcacccatccactcatccacccatccacccatccatccatccactcatccacccatccacccatccatccatccacctatccatccatccatccacccatccacccatccttccatttacccatccaccatccacctatccatccatccatccacccatccacccatccacccatttacccatccacccatccacccatccacctatccatccatccatccatccacctatccacccatccactcatccactcacccatccacctatccacccacccactcacccatccatccacccacccactcacccatccatccatacacctatccatctgacattcagtccattcatcagtcagtgtcctggaagctgtgtctgggagcaggggccctcatggtgccagcttctgccataggggagccaggatttggagagacagaataaagcatgacatgagggggtcccagtggttcagagcccacctggggcttccgtgcctgagaactcacagcctggctttgagaagggtggacagaggctcctagccccaccagggatgcttagccaagcagtctggctggagggtgtggaactttccagagtgcccagtggagaagttcccattgccctgcagacaacctgggaggcatagtagcctggatgccaactccgtcacctgccacctgccacctgataccacagtcctgcgtgcggccagcttgcctaggagtgctgtcccaccacggggctccctggactttgccggcagcatgcttgccctcaggccagctcatctcactgtgggccagtgagcactgcaccctgacactcctggtctggccctgacctcccttctgaggtatagaccaccctcccccaacatcctgctgactcagacactcgaaccgaactcagcagctccccgactccccatcttaatcatcgccccaccagccactcactctcacccagagtgggctgggagtcatggtagacccctcctgctattcagtccatccctagtcctcagaccacgcccctgcatctcttcagcccacacacctcacctccctctgcctcatccctgagagcacgccttaaaaggcaggctcatcacttcccacctggatcactgctccagcctctcctacctccagtccatctgtttgtcaagccatccatccatcttccttccttctttccccttcctttattctcttcacccatctgtccatacacctctccttccttccttctttcctttctctcatccttctttccatccatccttccaaccgttcatctgtccatctgcccattcacatgtccatccgtccatgctccctccttccttccatcctttcacccatccacccatccacccatccacccatccaccaatccatccagcaatccacccatccatccagccatccacccatccatccgtccacctatccatccatccacccatccatccaaccagccatccacccatccatccatccatccatccatccatccatccacccacccacccatccacccatccatccatccagccaaccagccatccacccatccacccatccacccatccatccatccatccatccatccatccatccatccatccacccatccacccatccatccatccagccatccacccatccatccatccacctatccatccatccacctatccatccatccacccatccatccatccagccatccacccatccatccatccacccatccacccatccatccatccatccatcaatccatccatccatccacccatccatccatccatccacccacccatctgacattcagtccttcgttcaccagtcagtgtcctgggcacttaccatgtgttgcactctgctagtgcatgttaaaggggcttcctaaaaaagcaaatcagcccagttcatggcttctgaggactcccatgatgcgcaggcatcccccaggcaccttagctccacccacagagcagcagcccaggtgccatctgctcccaggggggctgtcatccagaggttgagcctcctccggcttccggaagccccctcaactctccaagccatctgtactgctcaggccacaccttcactgcctggaacgccctcctccagaaaatgcccatgagaaagtgcccgccccgcccttacagctccctttagaagtcacctcctcaacaaagcagcttcggagtcggcttcctccccacccttcatggggtggaagcggccctgggggaggggcctgtggaaccaggtctggtggggcggcagtgtcaggacacacattggaaagtgttgtcacagcgagtcccaactgcagtagctctggagtctatggccctggcccctgagccaacaccttctgccctggtcatcttggccaccccaggtgccctaccacgtgtcagcaattgatctacactgcccccaatctcccaccttgggagagcctgagccccctgccacctgaggctcacaggcacctgtccttcagtgacccacccctcaagtggccccccaaagagaaagcctatttcctggcctctctggccctgagaggactcacctgctgcaggatcgagggacctgggagaagcttgggtcctgccctgagcttctcacagtctgccatgggagccagacactaacatggtgtacccagtgtgtggggtggggaagtcggccctgagcccacccgctcattcccagatagtcgctgagccccaggctatgtgggggtcaggcacagatcagacactgttctatcccctgtaatgtagggcctggcaccacccctgggcctcagtttccccatctataaacatggagaccggtcttggatagtaacatccagactgtggcccagggggcactgggcctccaagagggctggagagcaggggggcttggggttatggggagaggcagcccctaccaccaggtcaagccttccacccttccctgctctgggctttcatgtcgctgaaaaacaggatggggtgcttgaagcatcttgttccctgaggtcctgcgaggtcagatgctgctcggtccagtctgggagcctctggaggccatttccactctctctctctgccacgggacaccacaccccagatggggacagaccatgagggcctccgactcctccctgcggccagtccccaggaggaaagagagatcctgctgtctgccttgcacctgctgcttccacctcccaccaccctttctggtttggagggagcagctcctgtcagtcatcccctgagggaggtggccctaggcattaccacttgcctgtagctgggactgaagcctagtgggtctgcataaggcatacccacctcttccctacgccacagactaagaagaccccatgaggcagcccttgagggaaactcccacggccaagtcttggggatgttggtgtaagctccttcagttcagagcttcactgtgcctttgagagggcagggtcccttctgcccttcccccactgcaccctgggcctgacaagggtcccattaatctctgatgacaaagaggtgtcctctctgtcctgcttgtggtgggacaccccagcttctgctctcatcctaagaacagcagtatctgtggcactgattgatcatgtgcctcatgccaggccccagcccctgctctgtgttgtaacctcttcaacctgcaaggcgagatcctccagcttaagagagtgttgctcaggggtcaatgaccccagctggggcccctgagcgcagcgtttaatggagagtctgggctcatcaaacctggctgtgtccccttcccttcctgctttttgtgttctttcttcttttttcttttctgcaatttctttttttttcttttcttttttttttttttttgagtcagagttttgctcttgtcgcccagactggagtgcagtggcacaatctctgctcactgcaacctctgcctcccgggttcaagtgattctcctgcctaagcctcccaagtagctgggattgtgggcgcacgccaccacacccggctaatttttttgtatttttagtagagacggggttttgccatgttgcccaggctggtctcgaactcctgacctcaggtgattcacctgcctcggcctcccaaactgctgggattacaggcatgagccaccgtgcccagcctctgcaatttctttaaaagagatctgggtgttgtcatcttcctttgtccaaatgcccagtccttgctgacctccacactgccagcagactgccagggcacctgggttggccggcctggtctctgctccacagacaaccctacacatccctttgctgtgtcagcgccctcagatgggggacagaggctggtggaacccagagagcaggagctgggagttgtctggcacagctttgagtgaaggtgacctttaggcagaaggccaagttcaccaggcacacaggggaggaaggacatgctgggcagagggcagggcctaggcaaaggtgtgactggctgagagtgcgctggggtttggcactggaccgaacagcctcacaggaggggagggaggcatcaggcaaccctgggccctgacgctgccacagtctccccggggcactgaccatgatatctcatccccgcaggagcactacagcgccgagtgcgagtttgtggagcggatccacgagctgggctataatacgtatgcctcccggctgtaccggacggtgtctagtacgcctggggcccgccggcagcccagcgccgagagactgtggtacgtgtctgtgaacggcaagggccggccccgcaggggcttcaagacccgccgcacacagaagtcctccctgttcctgccccgcgtgctggaccacagggaccacgagatggtgcggcagctacagagtgggctgcccagaccccctggtaagggggtccagccccgacggcggcggcagaagcagagcccggataacctggagccctctcacgttcaggcttcgagactgggctcccagctggaggccagtgcgcactagctgggcctggtggccaccgccagagctcctggcgacatcttggcgtggcagcctcttgactctgactctcctccttgagcccttgcccctgcgtcccgcgtctgggttctcagctatttccagagccagctcaaatcagggtccagtgggaactgaagagggcccaagtcggagctcggagggggctgcctgcaatgcagggcatttgtgggtctgtgtggcaggaagccggcagggaagggcctgagtgccagccctggcagactgaggagcctcccaggagcagcggggcagtgtggggctttgtgtcatcacaacattaaagtattttattctactctgtcgtttggtagaccgtgatgcaggctgaggagcgcttgccgcctttactggaacgtgcttgcttccagcacagcagaatccgcgctggcatcagcctgcgtcagctgctgctttaagaggaagacggcattcccagaaatcgggctaaaggtgcatttcagttccctggttttagaaagttacgtttttttggatggttggaaacaagcaaaggcatgtttgtgcatgtgtgtgcatcgtgtgtgtgtgcgtggagagaaggatcgtgtatttctgaaagcgtgagtgtgcatgtgggtatgtgtgatcttgtgttagtggtacctgtgtgaggacatgtatgtgtgtgtgtgtttctgggtgtgtctgaatgtgtgatgtgtgtgtgtctgtgtgtgtgtgtgtgtgtgtgtgtgtgtgtggagagagagagagagaggttactttctttgaaaactctaaaaagcctctccctctggaagctgtgtgcttctccagggaccctttagagcaactgtgtcaggtcaggcagcacagaaacttcctttatccttacaacctgctcttggggcccgtgcaccctgtctttacctaagaaggtgaggctcagagaagcaattactcagtggccgggccctgccttggactaggtgcctcctcacacctgttccccaacaatggcatgggtggaatcacctgggccggcccaggtgagagccagcatgggcagtgtactaacctctcctggcacttggcaggatgggcagggtccaggtgaggaggctctcctgagcctgggactgtgaggaccatcgctctctgttcccatgccctcccaggggtcagagagcccagactcagagagcccagggtcagagaacttagggtcagagaggccagagtcagagagctgagactcagagagcccagggtcagagtgtccagggccagagagcttgtggtcacagagcccagactcagagagcccagactcagagccacctgattggttagtgcagactcgccaaacccacagggaggctgggctcctccctggcacgtgtgcaacacaagtgaaaatctcggtgcctccttcagcccccagcgcatgtcagatttcccggaatggctcccctgcagctgcgaacattcctggcagtcaacaggagcagcacgcagctgagctctgctgtgggttttgttgtttctctagagtgagatggggcaggggctgccatcactccctccttgcagatgatgaccctgagtcctggcaaggggaacttgcccggggctgtgtcaacacaggggaagcagcagtactcagtgctgcaggatcaacagatggtccctgatgaaggcgtaggagacactgggggctcttgtttaacatgtaaaacagctttgacaagagaatgtggatttttcgcagctgatggctgtgccatggtcaccttcttccccacaccagagtccaagggacttcattttgtgtgtgtgtttggggggtcatgggctgaattatgtctcctccccagagttcatctgttgaagtcctaacccctagtaactcagcatgtgaccttatttggaatagggtcattacagatgcaactggtgaagatgaggtaacataggagtagaatgacccctgaatccattgtgaccaggatcctccttaagagacacatgggcacagccgtgcacacaggaggacgccatgagagcgtaaaggtggggacaagggtgatgctgctacaagccaaggagtgccaaagtttgccagcaaacaccagcagctaaaggacaagaaaggaacagactctgccctatagccctgagaaggagccaactctgccgacaccccagtcttggacatccagcccagagtcctgcagatgataaatgtctgtttgagccacctaccctgtgtggggctgtgttaccacagcttgagcatcaggcacagagggcaaggggcctgctggcctccaaaaggagagcgaccccgcttctgctggatgaggggaaggggagagaaggcgggccccaggctgagagcgtgggctccctgggaggggtcagagggtgcccgctgcttccggtgccacggtgggaactcctgcttccttacacacaggaggggctgggggcaggtagaattctcctgaaaaagaaaagggtatgggggtgagagggtcctgggacccagcacccatcactgttagatggttcacctgctccacgtgtgctcagggcgggcagtgcctggagaccgcacacctgtggctctgtgggaagatgccctctgagtcaggaaaggccgccccaggggctccagggacagtggcctccctacttgcatttgcgtcacccagagggaatcggaagggagagaaagaggctgagcaggtggggcaggtctttgcctattgagtctctgggattttgggtccagaacctgtcaggagtaggaatggaaaaattatgcagtctatgaaaaatggtacggtggctcctcaaagcactaaacagagagctaccatgtgatccagcaattccatttccgggcatatccccaaagaaatgaaagcaggatcatggatagatgtgtgcacactcatgtacataacagcaccattcgcagttgcctgggggtggaaacaagccaagtgtattagtcagggctctctagagggatagaactaataggagatatatatatatatatcctattttatatatatatatatatatcatatatattatatatatatctcctatatatatataaaaaatatgtgtgtgtgtatatatatatgtatatatatataaaggggagttgattaagtactaacttacacaatcacaaggtcccacagtaggccgtctgcaagcttgaggagaaaggagagccagtctgagtcccaaaactgaagatcttggagtcagatgtttgatggcaggaagcatccaacatgggagaaagatgtaggctgggaggctaggccaatctcgccatttcacgttcttctgcctgctttgtattcactggcaactggttaggttgtgcccactagattaagggtggatctgccttccccagcccactgactcaaatgttaatctcttttggcaacaccctcacagacaaacccaggatcaatactttgtatccttcaacccaatcaagttgacagtattaaccatcacaccaagaatccatcagcagagggatggatgtatagaatgtgctccatcgatgcaatggaatgccattcagccttaaaaaggacagacatggctgggcgcggtggctcgcgcctggaatcccagcactttgggaggccgaggcaggcagatcacctgaggttacccgaggcaggcagatcaccgaggtgggcagatcacctggccaacgtggcaaaaccccgtctctactaaaaatacaaaaattagctgggcgtggtggcaagtacccgtagtcccagctactcaagaaggctgaggcaggagaatcacttgaacccaggaggcagaggttgccgtgagctgagatcacaccactgcactccagcctgggcgacagagggagactccatctcaaaacaaaacaaaacaaaacccacaggccaggtgttgtggctcacgcctgtaatcccagcactttcagaggctgaggcaggtggatcacctgaggtcaggagtttgagaccagcctggtcaacatggtaaaaccccgtctctactaaaaataaaaaattagccgagtgtggtggtgggtgcctataatcccagctactcgagaggctgaggcaggagaatcgctagaaccaggggggcagaggatgcagtgagccaagatcacgccattggactgcagcctgggcaacaagagcgaaactccatctcaaaaaaacaaaaacaaaaacaaaaaacaaacaaagaacccacaaaaattagccggggtggtggcgtgcatctgtagtctcagctacttgggaggctgaagcacgagaattgcttgaacccaggaggcagaggttgcagtaagccgagatcatgccattgccctccagcctgggcaacagaattagactctgcctcagaaaaaaaaaaaaaaaaaggaaggacattgacacatgctacaacatgggtgaaccttgaggacattgtgttgagtgaaaaaatatgatacaattttacttagatgagattcctgaagtagtcaaatccagagagactcaaagtagaacggtgggtgctgggagctgggggaggggaatggggagttagtgtttgatggtgagacagtctcagtttgggaagatggaaaggtactgaaagtagataatggtgatggttacaggttgtggaagtcctcaacgcactcaattgcacacttaaaatggtgacactcttgcagcaccttgattgcagtggttctgtccttcatcttcgtgccctccccatggaaagtgctcgttgagagcactggcagcatccaatcaccattgctggatgaaggaaaaaaaggaagaaaaggtcctcttggagtggccagtaggtcccctgcctgcccagtcggcctgcacagtgctctccagggtggacatgggcagagggagcgcttgaccggggtctggtccactccccgcttgccccacaggggaagacagccttgcctgggtgaagccaagagactaaggacccacactacccggccccctgcatcccagccctggagcccgcttgaccttctctgcgtcggatggagtcagtacttcaatggggagggtaggacggctgtgggtgcccgagcttcagctgctcggagcgggtctttgaactcctcagtgggttcagaggcctcctgcctcccaggggtggaaggactcagaaaggtgaaccagcaggcctataattagcgcccacccatcggagggccaccgtgcctcagcattccagggctgtgacagatatagcccctggagctgacctctgtccccacttggctgcaacggctggaataccaggggcagcctacacttgtgcctgagtgcctggccggctgtgtgtccacacaaggaaggggaccatgggagaagaggcttctgggtgggtaaaaagccagcacatgtgctgttttcagacctgctgattcagatgtggccttagtcacttctgttatttgatcatgacagcattttcagccacgtggcccagaactggccgctgcccctccccagcctcagtgtccccatctgtcaagtggggctcccacagtggtcattgagagctgctgaggccacatagatggtaaaaggtctgtaaataatagctgcatacacagccatgagaggatgcaagagaaagcctggccctgctctctagccagcagcaggggaggcacagtgcagagaaacagaacacacttccactaggtgccctttctgcagcactcttgctggaggggctgctgacctgggcccagaaggtggggaatgattggaaaagtttagaggacacagggagtgttggtggtgggctgggagatcctgggagctctcatgccttgagcaggctggtttgaagacagaaattttaaaaattcatttattatcactgataaacaaatacatttatctgtgttttgtacagttcaagagaaaggcactgtaattcatcatccctccatccacttatcttttatccatccatcatccatctatccatccatccatccatccatccatccatcttccatcttttcaaccatccatcttcaatccatccttctatccttccttccatccatcattcattcatccatccatccatctgtccaccatttatctactcatctactatgccttcatccatccatccatcttccatcttttcatccattccatccatccatccatccttttatccttccatccatccttcattcatccatccatctgtccacccattcatctactcacctactgtccatccatccatccatccttctatctttccatccatccttcattcatccatccatccatcatccatccatccatccatctgtccacccattcacctactcatctactatccattcatctatcaatccatcttccatcttttcatccatccatccttctgtccttccatccatcatccatccatccatccatccatccatccatctgttcacccattcatcctctcatctactgtccatccatccatccatccacatccatccatccatccatccacatccatccatccatccacccatccatccattctcccatccttccatccatccattctcccatccttccatccatctatgcatctttccatccattcatccccccatccatccactcatctaccatccatccagcaagcatatgggcatccatcagtgggtctggagcctgggtagagaatgcagcaggcacccatacagctagctaaatgccagatactctgctgggcaggatggacagaggtggagctacctctccttgtgcatcagaatctttcagtttcacaggggacaggctggccctgggatatggaaaggctcagattgcagggctgaaggaagggcagagaagacaggacagagaaataactggctgcctcatgaggagtgtttaggatctcaggccctggagtcaggtcaacctgggccccaggctaaaagctcccttcacaggctgtgaggccagataaagcgctctgatatctctgtcaatcccaaactctcccctgccccaggacctttgcacatgctgtctgttgagactaatcttccctccactcttcactagttgagtcccttcataatctttacttctaaaggtgtcacctcttcagagagacctaccacgaccaccctactccaactggggccccttctcattttgttcttacagtgccttgttattttccttcaaagaacccaacataatctgtaattatctagttaattgtccactcactgctgtccccatcagtctcccacatgcaggtgaggcacctgggctatttatttccaccaactcaagtctgcctttggttgaggactactcccagggacagacactccctgaacttctggcctgctcccctcagacaagaaatccaagggcttgtgatgggaagccctggggcctctttgtgcagaagggtgaggcctgaagggttatgggtggaacaacgccagtgtctgctacattctgtcatgattcaccttttgcagatgagaaaactgaggcttagagatatgaagcaattgtctcaaggtcacacagccagtgaaggacatgtcagggctgattccaagatctctcaggctccaaagtttatattacatggagcccaaggaggggagcaagaacaggaagtcgccaagaagtgagaagtgggaaaatagtgtggcagttctgaaactgcagaacagagagttacacatgacccagcaattccactcctaggtatatgccccagagaagtgcaaactcacgtccacacaaaaacccgtatactaatgtttctagcagcattattcatcatagccaatgcgtggcaacaacccaaatgcccaccaagtgattaatggataaatacaacgtatccactgtctactgtagatagcatatacgatgctatatgtatacagtgctatggcctaggatgaaacggtgttcacagacaaaaggaatgaagtgctgaaacgtcttacaccccctcaaggcatgaacttggagggccaggtgctaagtgaaggaagccagaccaaagggacacacttacgattccattcctatgaaatgtccagaataggcaaacccatagagatgggaagtagattagtggcttccaggggctgatggggaaagtggagagactgctcattggtatggggtttcttttgggatgatgaaaatgttctggaatagatggtggtgatggtcaccatcacactgtgaatacaaataatgaattgtactccttaaacaggtggattgtatggtatgtgaatgatatcacatatgaatgatacctcaatgaatctgctggcacagccacgtggtctgcaggtctttctaggagaatggggttgggcaggccctccccacccttggggacaatttggggtataggaggtgggggctgggtggtcccaggtggtctgggagggcacccctgcatgcagtactgaggcctaccagcagatggcagcgacctcagggacaagcttcaggtgtagcagagttggctgaggacacctcgccgggtctttccattcatccatctttccacctggtgggcaatggcgcctctctgccggtgacatgcttgtggcgactgctgattcaccctggtcaggcggtcagggaggagtcaggacagaccgtgcctgggcatcccggcatgccccaatggcacacggaaggcagagggccccctccccaggcacaagggccaggcttggcacggaagaggaggcagtgggcctggggcctgggtagggtatgcagcaggcgctcatccttgccactggaggaaggatggacagcagagctatacaaaatgatgatgatgatgatgatgacaatgttggggggagagggagaaggggagcatttagtgggtgcctttcccacctggcgccatgttgctttgactccacctcagctctctgagttgagttctaattctccccatatgataggtgagtcagagaagaaaggctttcccgaggccacacagcttccaagaactggagccaaattcaaacccagctgcccggctggtcttgggcccaggtggtcttaacgggatcttgattccttgattccatgtttttcgtcttagggtgtgtgtgtgtgtgtgtgtgtgtgtgtgtgtgtgtgtgtgtgtgagacatagagcgagactgtcactcaggctggagtgcagtggcaccatctcacttcactgcagcctccgcctcctgggttcaagcgattctcatgcctcagcctcccgagtagctgggattacaggcccatggtagagacggggtttcgccatgttgtccaggctggtctcgaactcctgacttcaagtcatccacccgcctcggcatcccaaagtgctgggattacaggcgtgaaccactgcgctcggcttgtcttagggttcttgatttaaaccagtggttcttgaaatttgcatttcaggccccaccccagatctgctgaaccagaaccctgatgatgatgcccagtaatcagtgtgtttcaagccctccaggtagtttggatgccctagaatttaggaacccccgatttaaaggggcatccccatgggttgctaatgccgactgagttagcgtacaaagtgctctgcaatggctgggtgcttttcacccatcatccactgaattcacccagtgaccctgcaaggatggccattatgattcccattttacaggtcgggagactgaggcccaggggtaaagcctgaagtccctagctgggagagatgagcttagacaggaggctgggtctgagaggccactgtgcaccaggcatagtgactgtcacccccaacatacacacattctctacagagtgggggttccggggaaggcattgccactgaaatatgggcatcactgtctggggacacctcaggccttgtgtatgagaaagacaggccagagtgggagtggagggtcacggtccgcttgaggctcgccaaggcctcatctggggcatcccggaccccacagcagcagggtgggtcctctcaatgctcacccgacctgcagcccacctcaaggtgcacaggaaaggcttgctttcagaacccagtgggtttgagtccacagtttgtcttggtcccagttgaacctcccagagtatctgttttccctctatgagttatagtggaattcagcctagctatgcaggccagcaaacttaagatacatgcaccc

SEQ ID NO: 643 - DNA, 1400 bp, Homo sapiens
cgcccctcccgcgcctccgcctggggaccacgtcggccttttgttggcgaaccgtcctttctttcagcgctttgcgcagcaacggaaatttcattgctcctgggtggaaattaaagggactcgcgttccctctctccctctccctctcccactctccctctctttctctctctcgcccacccttcccccttcttcccccacctttcccgcgaagccggagtcagcatctccaggcgcgggatcccgctccgagcacctcgcagctgtccggctgccgccccttccatgggcgccgcgctcgcctgcagccgccgccgccgcggggcgggcgcgatgccacgatgggcctaatctggctgctactgctcagcctgctggagcccggctggcccgcagcgggccctggggcgcggttgcggcgcgatgcgggcggccgtggcggcgtctacgagcaccttggcggggcgccccggcgccgcaagctctactgcgccacgaagtaccacctccagctgcacccgagcggccgcgtcaacggcagcctggagaacagcgcctacagtattttggagataacggcagtggaggtgggcattgtggccatcaggggtctcttctccgggcggtacctggccatgaacaagaggggacgactctatgcttcggagcactacagcgccgagtgcgagtttgtggagcggatccacgagctgggctataatacgtatgcctcccggctgtaccggacggtgtctagtacgcctggggcccgccggcagcccagcgccgagagactgtggtacgtgtctgtgaacggcaagggccggccccgcaggggcttcaagacccgccgcacacagaagtcctccctgttcctgccccgcgtgctggaccacagggaccacgagatggtgcggcagctacagagtgggctgcccagaccccctggtaagggggtccagccccgacggcggcggcagaagcagagcccggataacctggagccctctcacgttcaggcttcgagactgggctcccagctggaggccagtgcgcactagctgggcctggtggccaccgccagagctcctggcgacatcttggcgtggcagcctcttgactctgactctcctccttgagcccttgcccctgcgtcccgcgtctgggttctcagctatttccagagccagctcaaatcagggtccagtgggaactgaagagggcccaagtcggagctcggagggggctgcctgcaatgcagggcatttgtgggtctgtgtggcaggaagccggcagggaagggcctgagtgccagccctggcagactgaggagcctcccaggagcagcggggcagtgtggggctttgtgtcatcacaacattaaagtattttattctact

SEQ ID NO: 644 - protein, 237 aa, Homo sapiens
MGLIWLLLLSLLEPGWPAAGPGARLRRDAGGRGGVYEHLGGAPRRRKLYCATKYHLQLHPSGRVNGSLENSAYSIITAVEVGIVAIRGLFSGRYLAMNKRGRLYASEHYSAECEFVERIHELGYNTYASRLYRTVSSTPGARRQPSAERLWYVSVNGKGRPRRGFKTRRTQKSSLFLPRVLDHRDHEMVRQLQSGLPRPPGKGVQPRRRRQKQSPDNLEPSHVQASRLGSQLEASAH

SEQ ID NO: 645 - DNA, 61791 bp, Mus musculus
  misc_feature (1)...(61791): n = A,T,C or G
tgagtagttgggagagggaggagggaaagaggagaagataaggatgaggagggaagagggaaaggagggagtggaaggaggagggggaggaggagaggggaggaggggaggggagggggggaggggggagggagaaactgagnnnnnnnnnnnnnnnnnnnnnnnnnnnnnnnnnnnnnnnnnnnnnnnnnnnnnnnnnnnnnnnnnnnnnnnnnnnnnnnnnnnnnnnnnnnnnnnnnnnnnnnnnnnnnnnnnnnnnnnnnnnnnnnnnnnnnnnnnnnnngggagggagaaactgagaaaacaaggatggataaaccacagcagtgcatctcgcccaggctgtaccacaaggatagtttttaattcgtctctaacatttcatttcctcctattacactgtaattgaatgtaaaggacccgagcgaccacagccatattctctttggcagacaaaccacacacagtcttttcccaccatgtaatgaaaacatgggtatctttgtgcaaccggctttggacggtctgccttcttaatgcccatctctgtctctgtgcttatgcccgccagcattaatatttattagaggcgttaggctattagtgggcatggtgcgcctgcctggctttgtagagcatccaatttgaacacacttgctctggataaacacttccccgtgctggtaatgataactcagcgcagccccgagtcttatgaactagaacttgagttgaagtgaacagcccctaatgctcagaatctccgcaggggtggcacatctttccacagagggctggcttctccaggctcctcacccatgacatggaccgacctcaggctccctgtccccaaaactgaatgttctaggcttgtagttcactgaaaaactcaagaggaggtgacctgttacattgcttgacttattttgtatgtgtgcctgtgttttgtcacgtgtgtgtacctgtttgtatctctgtgtgcctctatgcctgtatgtatgattctatgtgtaccttcgtatctatgtgtgtatctcatctctccagctaaactctaagtaaagtccctgtgggcaggggctgagttttgaacctgtttctatgccccccccccccggcccagcttaggatggctctaggcatctaataaacacttaagaagttagttcttgactcttgtcaagtcctaagaaagtattgatcacttctgcagggatgctgactgagaggatgctgggatctgattcgtttgtaaacacttccgactgcctgttatatggcatgtgacaaacctgggtggcccttgattaattagtcatggcttgtggccaaaataacatgagattgtaagtcaggagaccagataccaggacacatgagcaccccaggatgagtgccttgccctggctgaaggcctacctaagcctcccaaaaggagatacatttgatgtcagcaaacttcctactagcctcaaatgcttgattctatgactttattttacaaatgtacgatcttcttatttgtgacataaacccccacaggaacaaaaaaacaaagtcggtaataaattatgaaaaaaatcaggtgccctgatcatttgtacgttccgagggtgctggattcagtcaatcccacccctgtactgcagcctgcctctctggggcgacagaagactcaaagctgtcagtggagcaaactgtgccgtctctccccgtaattgtattgacaggatatcagccaagttgctgcggcgggaagggtatgctctgacaggttttgtgagggagcctcgaaggctattgtggcaggattctatgttgagtctcaggattctagggaaatgagaagctgggttctttctcaatttaattttaggcttcccagagagtttcgcggaaggaaagctggctggctgcacagcacttgacaatggagaagcccttgccaatgaaaactatttacattattttttgtggttgcataaaacaccatcttgactcaattaattgccattaaatcagcagttggcttgggtttcaggacgagaccagctgctgagtgtttatagataaaacacctgctagcaaacctgaggtttctccttttcctctggttgccgtggcttcatgaagtcatggttttgaataactgatgcagatacagtctggtaaattccacgggtagaaaatactggggttaggtttcttcagccagtgtctctgtatttgaagtagaaaatgaaagaggaagaagaagaggaggagggagaggaggaagagggggaggaaggggaagaagaggaggggggagggagaagaaacaaacaatcatgggacctatccatgaggagagtcaatatttctagggtgatggattcctctcatagagatgtacttctttaggcccaggaacagacaaggctaaaatacacctcagttcccagtatttccccaaagacactcagacccaagagcacccacatgatgaggaagctattcaccccaacagtggggccagcaaaactggcacccccttaaaggaacctataaatcaaactcaatcaaaatgacagaactgtatacatattttttgatgttctaaacccctaactacttgtaatatttccattttctttaagtctcccccaccccgtgtttcagaattcaatttgttttttcacatagagaaagttgtgctgggcttttaggcgtggcttttaagccagctctgtcagaaactggcgtcaaagccttgcagacatttccccatgcactggtttataaggagtatctgcaacagggagaagctggcttctttttcacattctctctctggcaacttttatacaggctgagttttgacggaagatcttacaggaaggggtaaatactgaatgcggacatcatcatcctaacagttagctgagtttcaaacaccaaaaacaattggaggaaaagactgccccctggtgccacttgtaccagagtgtcccaagccctgtcaccaaagcgcatcaggatgtggcccctgccattggtcaccagggaccaggacagcctgaaaacagaaccccactggtggagcaatcatcactcatatttttaaaaacatgatcattctaaactccagctctagaaacaaggatggaattcctcctggaggctgttaagttagcgccacctacaggccaaatgctgcccttgattaaccagggagaaggcaaaggggaaggggggcggcattcacatattgtatttacacacattgtagtttatacacctacatacaaatgctaaacatatagtgagcaatatataacacatgtgtggcctatatatatacaagtgcatgcagttatatatgtgccacctggagtgaacgttacacaagaattcactgtggaagtgactctataatgcccttcctctcatataaggagctgcacactagtgacacctgattaaagcaatgttggacttgatgcaccagggcagggagatacggaggggggactgccctctcagaggggaggggaagagagaggaactcttcgagggaggacaggggtcgggagagggcagcatttgggagatagatagatagatagatagatagataaaagcactgttggaattttatcaggacacccattgataggcactgataggccttgatttcctccttggcctaaggcagtgaattccaactctctgtcccaggtacctgctaagatcaggaatccaagaagtaagcaaaacttgttccactgtggaaacatctcagaggggccagtgctaaggatgctgcttcatgggttccctgtatctagcttctgtcctcctgggagcattaattagcccagaaaggtctaacaatataggtctgcctatagtcaaagaacccatcagcatgcccatacctctatggaacctggaaaccgaggtcaatttttagaagcacactgccctctagcggcacaagataaatttgcgccactaaacttcaactttactttttcggtctcccggcgcctaaagaggcagagccacggccacgtgtaggttttttttgggttttgtttttgtttttgtttttcgagacagggtttttctatagccctggctgtcctggagctcactttgtagaccaggctggtatcgaactcaaaaatccgcctgcctctgcctcccaagtgctgggattaaaggcgtgccccaccacgcccggcccaagtgtagtttttagccagacaggaaaacagacaaaagtgcggaggaccagcaccgaaagggaaagtgatctgtctataaacgctgctcccacgcaagtgccagccacgcctcctagagggctttgaatctcacacccccagcacacttaagatggtgttgtgatactttcccgacagtcagtcccagagcacctgctgcatagtagaccagaggtgctggggaagatggatcttgggtggcaagggcatggatgggtgcctgagacctgtctgtcaccctgtgggtacgagcccggtagagattgccctatccatagtctttcccagtagtggggaaagaccccgctaacgtgtgccacttgaggacactgaggttcctggactggctacgactgcagagggtccaggaggcctgtttcacccagagcaagtttcctacactgcgcccaaaccctgggccccgggtcccgagagttcagcagctggaacccatcggcggcgtcggtgcccgcggaggggatgatcgtgcccaggcgctcaccttgacgatgagcgggttctgaaacatggagtcacgcacgacccccagcctttcgttctccatgcccgtacggatgtcgaccaccgtcagcggccgtcggggcggcgggcagatctggctgaccgtgcgatgcacgggctgcttcttctttttccatgccgtgaggtctttcccgggtttcgccggatcaggcatcccaggggcctccgggattagaccttggctgcaaagcccacagagttctgcgctgtctgaggactccagccccgagcgagcgcgcgctccgggctgcaccacggggaccctggggtgcacctcgcggcaaggcaggctccggagcagagcgcgcccacctgcggagcctctgtccaaagcttaaaccccgccagttcttcggagtgatttgggcacctcgcagcagactgagagagggaagagtgtctacactacccctttcggaaaaatggaacgtcccgtctccttggtgacaagacgccaacagctcaagagcttccggttttctttctagaaattcttagcaaccacagagaccttttagacctgtctcaaatcaacatagaaaaacccaagaatcaaatctaggttgtgttaaaagagaagaggttttagaggatcacttatccttggcttccaccctctaactaccctactctagttacagttccctcccaagggaatcttttcttcttcttcttcttcttcttccttcttcttcttcttcttcttcttcttcttcttcttcttcttcttcttcttnnnnnnnnnnnnnnnnnnnnnnnnnnnnnnnnnnnnnnnnnnnnnnnnnnnnnnnnnnnnnnnnnnnnnnnnnnnnnnnnnnnnnctttctcctcctccttctcctcctccttcttcttccttcctttcttcttcttcttttctccttcttttcttcttctcttcttcttctcttcctcctcctcctcctcttctttctcctcctccttctcctcctccttcttcttccttcctttcttcttcttcttcttcttcttcttcttcttcttcttcttcctcctcctccttcttccttcttccttcttcttcttcttcttcttcttcttcttcttcttcttctctctctctctctctctctctctctctctctctctgggatatggtactaacacagtcgtactgcaatagaaatatgcattcttaggcttgaggtcaatgctaattcagtgggtggtcccaagccagtttccctgttggacacttcctcccacctcgaaagaaaaaaaaaatatggattagatcaatagtgtctgactctggaatcaaatggagggaaactgaaaaagatcatcaggtttggttcactgagtaagaatatctgaaaataaggccggggagatggctcggggtgtgaaggcacctgcctctaagcctgacaacccagtttgtttctcaggacccatatggtgaaaagagatcccacccattccaagttgtcccccgaattgcacgagaatgctgtggcacacatgaacacacacacataccaaataaacaaatataaagacccagttggaaatggcatctgagattatccttaaggatctattaacctacaacacaatttttttttaattaaaaaaaattcaatcctaccagaaagtcaaaaattggggggggggcagggggacaagaaaaatggttcaggactgaggaagacttgctgttcttgccaaggacctgggttcaattcccagtacccagttaatgcatcacaaccatcagtaatcctggcctccaagaggcaccaggtgcatacatgccatacaaagatatacgaaagaaaatactcatatgcatgtcattttaactgaatacagtggattcaataaaaacctgaggatgttgcccatatttacaatcctttggatggttctaaaggcatacagtccattgtggcaggcaggcatggtggctggaaaagtttgctgacacctcacatcctgaactccccaatcatgcaggatgaagggagggaggggacaggagggagagggaaagaacactgggaatagcaggaggcttttaaaccccagtgagtggcctacttcatctaggcctacacctctagacctctccaaacatcatcaccaactggaaggcaagtgtttaaataggtgaggctattctcattcaaactgctggaaaccctaaagacttcaccctgcataaagggcattttcttttgagggtatttttcttaaaacatttaataattttgtgcatgtgtataatgagctttgttcatatcttttccttctccctctccccaattgctgaactccctcttcttgtcagcaagtccctcttccactttcagatcttattttgtgccccactgaattcaattagggttgctgacctaagcatgggtgggggtgactgacactaaggcataaagtcctcctggtccccaacaaccattaactgtcaagggcactttcggacagggccaggtcctcactatgtctactgattatgagagctatgtagccctaactggcttggaactcacagtgtaagccaaactggcctggaactcagagatccatttgcctctgatgcctgagtgccccactaaacaaacgtgtgtgtaatgatgctttgagtgtccagagctcctttataaaaactttttaaagacttctttatgtgtatgagtattttgcctgcacatgtgtttatgtacctatgtcttgtctgaagcctgcagaagtcagaagaggttgttggatcccatggaactggagttatggatggttgtgagctaccatgtgggtgctgggtcccctgcaagggcaaacaagtgttcttgtttttcttcttcttagatttatttattattataaataagtgcactgtggctgtcttcagacgcaccagaagagggcatcagatctcattatggatggttgtgagccactatgtggttgctgaaatttgaacacaggaccttcagaagagcagtcagtactcttacctgctgaaccatcttgccagccccaaacaagtgttcttaaccaataagctgtctctcctgctccatgtccatggattttaatgtggtacagtaatgatgtctattatgcagacatatgaaaaataagaattctttttagaggctcaatggttattggttgctcttccagaggacctgggttcaattcccagtacccacatggcagctcacaacaactgtctatagctccaattccaggggatctgacaccttcacaaacacacatgcaggcaaaacaccaatgcacattaaatttataaaattttgaaaaagaaagaattctttctgtgaaatgctttattttattgtactcatatgggttttggcctacaggaaagtctatgccccacatatatgcagtatatgtgagttcactgatccatcttcagcactaaatgcaaaaacacccacttccacaaggccctgagttcatcatggagcaagacacactgataaccaatctgaactctgaatgtcaaggctttaccgaccagcagtggacactgtcagtaccaaagcagacagcgcaaacttccagctgctcagacaagcctgactcggtgtgtttgcttacagtttttccagattgcttcactatgtaacccaaacctgtgatcctcctgcctcagcattacaaatgctggaattacaggcatttgttactacagctggcaaattgtgcatttttttaaagatttactttttttttatttaattttatttttttttaggtattttcctcaagatttacttttttaatgtatataagtgttttgcctgcacatgatatgcatgtctaccatatgtatacacccagtgcccgagaggtcagaggagggcattggagcccatcccctggaactggacttatggacagctgtaagccacctcataggtgctgggaactgaacctgggtcctctggaaaagcagtaagtgctcttaaccactaaaccatctctccagcccattttaatcaaaggtgcttagtagctcacacagaggaacccacagtagtttgaagaaaagaagaatagtagaggggaaagcatggattggaaccctggaccagatagatcatcttaccaaaagcctcaaattttcccactacaagaagggactgagggctggtgaaatggctcagtgggtaagagcacccgactgctcttccgaaggtccgaagttcaaatcccagcaaccacatggtggctcacaaccatctgtaacatgacctgacgccctcttctggagtgtctggagacagctacagtgtacttacttacatataataaataaataaatctttaaaaaaaaagaagggactgagacagtattacctaatacagatacccacaacataggattgttgtaagagtcaagaagacagcttttaggctgctatacggctcagttggtagagtgcttgttcagcatgcatcagtccctggcacagcataaaacctggtatgatggtacctgcctgttatctcagtactgaaagtagaggcaaaggaatgagaagtccatggtgagtttgaaggcaccctaggctacatgagaccctgtctcaaataaacaagagaaaagctttcaacttttatgatcaccacacaaaaatgtaactgttttaacgttccagtggtatagatattagctctaatttgatggctcaattacatttttcacttttttttttcttttcgagatggggtttttctgtgtagccttgactgtcctggaccaggcctcaaactcatagatctgccttgcctctactaggattaaaggcatgtgccaccactgcctggctgcttataagctaagttttggcttattattattattattattattattactactactactactatgagagtctcactgtatagactggcttcaaattctctttgtagatcaggcttgcttcaagctcacatatacctgcctgtgcttctggagggctgggatttgcctgggttgcttaattagaagggcactctttttctctatcctatacgtagcgtcacgaccatagatagacaactacgcatgcgtccaatccttgcgcgcctccatgttactatggcagccggatgcgcagctggccggaagtcagtacagtatttccgcctaacaacacttccgggttggaagacgagcgctacattgtcgctgggtaggttggatgagctttccttgagtttctgcgccccaagtgtggcgggcggctgcgctggtgccacgttccgagtgaggctgcggcctgaggcggttgtgcctgttcctcgccgccgggggcagtgggggcctgggagccaggccgcggcccgcgggttccttctagtctgttcctccggtcgccggcccgggacagagcagggtcagtcagaagctagggtggtgagcggaggttgcgcggggccggaagtggggttagtgggttaggcgcttttccgctccgtagttgaagctgagcgcttctcgagaaactgccgggctgtttgggaagtttgtgcggaagggacggtgggacccagtttggagtccgtgactgtaccctgataaagtggctttcgcaccgaggctagtcatcgggcttaacggcatcgcgaggccgttaggaaatcggaacacttcccaagacagaggatgtcaagaaatgaactgcaagggccagaccttgttatgaggacctgaaggccctggaggtctgaaaggatgttgattttacacgaagaataacagacaaaagagttgaggttgaggagatggcttagcaagtaaaatacttgcacaaacataggaccggagtttaaacttttagcttctccacttacaccctttttcctgcgcatttagtgaggataaataattaagctctaatgcataaatccctctcgttcctcaagattgggtaagggtgtgaagagatggttcagcggctaagagcacttgttgcttgtgtagaagacttgggcctggttcccagcagccagttctatatagtaggttacacccatttatgacttaagttctagggacctccacgagcacccagcagacaggaggtgcattcatacacacaaaatataatcctttttttttttcttaattacaaacaaggttcaggaaaagtggttgtaattaattgttaccgaagtgacctcagcccttggcaaaaatttctctggggcccaaaaagagctcaacagctttaaaagacaaacaaaagcccccaataaaagagtaactaaatgtgttatcacaataaggatgtggaggaaaatagggacccgactcctaatgatgactcctaggagggtcaggaaccaggggagctctggcagtggtgctcagggaagagactgatggatggctagcatatccatttccgttttacagtttggtcctacgccatttcaagtgttcaataacttcatctggctagtagctaccctaggggacactcgggtctagagaaacagaacttgttctggagagtgttctggttccagccgtgattttaatacagcccaactgcccacttgtgggttttccttctgttctcagcacagggacagccaaaaggaaagcattaattcatgccaaaaaaaatgaaaactactaagcagaaccagattaggttctggggctacagtgattatgtaagactgtcttagatccttagccctagttcactcctgctgtgtcataccttgcaaagtctttgaaagggtcccctgcgtccctaggtaccactttccagatgggggatatttctgagggaggaaggtctaaaacagagctctggtaccccatggaaggtgaaggaactgccttgtaggttcaagtgttctttcatggcctcctccctccaaaacacagtttttacagctgctgtgcactgcccagtatgttaggtaccttctataggaaaggtgcttagcatctaggttggctgaagcctctggtgagtgagtgagtgagtgagtgagtgagagagtgagtgagtgagtgagtgagagagagagagattggttccgagtctgttagtaaaacagtgagtgagtgagagagagagagattggttccgagtctgttagtaaaacaaactacaggtcagaacataaagatagtgagaagaaatctgaaacactgtttttggctgggtgtggtggtacacacctttaatcctgtctcccaggagacagaagcggttggatatctgtgagtataaggtctgcctagtctacagagggggagttttaggacagccagggttacacagagacattccgtctggggttttgggaggagtgcactgttttgaaccacataagtatgtcacctagtcaaagatatattctaaatatttattctaaatatttggacccagaagcaactcagattgaggagaggaatatgaaatgtttgtaggtaattcttttttttgtttgttttcaagacagtgtttctctgtgtagccttgtagccttgactgtcttggaactcactctgtagaccaggctggcctcgaactcagaaatcctcctgcctctgcctcccaagtgctgggattaaaggcgtgcgccgccacgcccggctgataattctttatgtactggggaggagggtctgagggagggattcagcatcccacgctggcctcaatcttactgtgtagctgagaaggatcctcctagcttcacttctcagtgctaggtcacaggtatgtgcaactgtagatttatggagttttcttgttgtgctggtcactattaagacacctctgctctctttgtcagaggccagtgaccctgcatgaggtctgggggatatgaagtgatgtcaagatgagacttgcttcactctaatgaggggctgagccggtgcttccaggcagtggaaatggagcagcacacacaaactgccttcctttgtgggatctgaatgtgccagtagaagagagagatgttgaatgactgagtagctagttgctaatttttaagttacaagtgcttcagaaaagcagatagccacagagaacaaagagaggcagctttcctttgtaaatggatactggtgttcttctaggatttcatatgtagtttgatcagattcattccactacttccccaactcctagatctacccctactcccctccctctccccacaatttcatgtcctctttctgttttacaaataaccatccagtcaggtttgtgctaccatatattctgagtatggggccagcctctggagccatgtcaacctaccagggatcacaccttagagaaaactgactctcccttccccaggagcctctgtcacctcagttaggagtggaagctcattagcccctttcccaacacatttgaatattgactggcttgatctcatgcaggcagctacatacagctgctgtaagttatgagcacagcggccctatcatgtccagaagacatgttttgctccagttccctcaggcaccagttcttaagctctttccccttctgaggtggtcattgagccttggagggtgggtctggttgttctgtctgtggctaagcactcctctgacacttgttccctggcctttgactggttgtgagtttctgcatcaatcaactgctgtccactgcacaaagaagcttgtgtgacatggtctgtgagctgccctggtctgtggtcaggacaagggtagatacagtgattctgcctggttagcacagcagcagtggtagcttcaccctggggctgggagctctctgaccacaggctctggtccagagttgcaataccaagcatatttcctcctatggagcaggccttaaatccacccagaaagtagttggctgcccttgaggtagttacgccactgttacatccataggcacagttttagtccacagggctcgaaactgggtaagactggtttgtccacccagcaccccacatagcaccctctgatactatgaaagctagccagtatgaaggaaccttcccaccaggtgctgtgatgcatgccggtaatcttggaactcaggagactgagatgggaggattgtacccagggtgggtgccaacctgggctctagagcaggacttttctcagtaaacaaagcagagcagtattctacctaaactcacaggcaggcaagggagccccaacagcaacagagatgttaaggagagctaggaaaggactaggcaggttgggagaaccacagcaagtgcacatcacagaagaggagtttgtaagtggcatctggccctaggctctgcagggcagtgttatttcttgcgaacttgggaggggtgtgtatgtgtcgcacgcacctatgtgtctatcataaaggcaatgggtctaggcaaagtggatctcactcaacttcctgtgtatttatgttcatgactccagatttgtcatacatttgtgtttgactgtgctgttacccctgtccccacacttatgtttaaaatgccaaaataaaccattgttgtcacattttcctaaagggacaggatgaaagggggcacaagcaaatttaagacccacactgaaactttgtacaagaaaaagaaatggtcttctgtgtctgaaaaaagacctcagaaatgtccctctcagtgcttggagagcaagcagcctcaggtatctgtgttggggaagaggaggagggcgtcccagacaccagcccaggagaccttagagagtgagtggcctcaaaaggccaagaggaagaagaggaggagggaaccccagacaccagcccaggagaccttagagagtgagtggcctcaaaaggccaagaagaagaagagaaggggggaaccccagacaccaacccaagagagtttggagagtgagcagcctccagtgtccttgctggggaagagaaggagggaatcccagacaccagcccaggagaactcggagagtgagcagcctcggaaagccaagagaaggaggaagaaaaggaaagggtcccagcaaccaacttcctcccttctgaaaactccagaaacctttcttaaagctaagaaaaccacttctgcccacaagaagaaaaagaatagtgttctggaggtggatatggaaactgggatcatccttgtagataaagaaaacatggagaacctgctagagacttctagaaaggatgtggatattgtttatgttgatatgagcaagggacaaaggtcagcaaaagtgcgtgaaacaggagagctgcccgctgctaagccacaggaacatggctgtcgagagctgctcggtgacgtcaggagcagaaagaaacaaaagcacctccagaaagttgcaccctgggatgttgttcaggggagccagcctgagagtatctccctgcccccatcagagcccttgtcttctgaagatttagaaggcaaaagcacagaagcagcagtgttttgtaaaaagaagtctaaaaaaaacgtgttcaggagccaggaattggagcccatccccgacagtcttgatgactcggagaccatctctgagagacttgatagcacacaccatggaggagctgtcggggctggagaagaatgtgagagcaccaaagaatcccacagtatcaaaaaaaagtccaagaaaaagaagcacaagtctgttgctcttgccacatctagtgacagtgcctcagtgacagacagcaaggctaagaatgccctggtggactcctcagaaggcagtggtgctgtgagggaagaggacgtggaccacaggccagcagaggcagaagcccaggcttgttccactgagaagcacagggaagccatgcagaggtaaggggggaatggggcgtgtcttctgtgtgcgtatgagatgacagaaaccttaagactcgtgacatttaattgagcagatagctgaatgttttcatatgtaaatgaagatagttagattttcactgagatctattctacctaattctataagtttgcaccatttgaagacttcccagcccccatggcttgtctaagagtgtgtatgggcataccttacactggggattctgcggagcagcagaagcttggctcccgcacaaggaatgtagctatggttatgtctcctgctgtatcagtctactgccccacttgcagatcctgaacccgggtcaggtttttatcttcttacttttgttacttttcattcagtaatctttttgtgtttgtttggtagttctggctttgaatagttttacatgactgctaaatattaagtgtcacgtgggatggtattgataccacatatgagccattcacactgtcctctcactgggacattgtcagttcatcgatcatgaggcaggaatacgctagggctgtagcgctagctttccttgggccacgggtcttaggaaagtcactgacttgctaacaagtggactagaggatgtagtttccagcctggcagactcgctggtgtttgcctgaacatgtcaagtaagcagattctgccatctgctggagaactgggaaaagcatttgggaagaccgagggagaaatgaggccagggcagcaggagtagccacagctgggtatacactgaaccccagccaaccagttaggagccagggtattctacagctcaactcactgtaagggcggggcatctctgtagagatcaaaagggctttatttactagaaccatgggtgagaattagcacataaactagcactgactggtaggatcgatggagttatctctgtccacacgcccattcaagctaatcggggtgcataaagaatttgaaaattattgagtgaatggctgcctcccaggtgcagtttaacttcaatacttttctagattgagacccgttcagagagttaaaaggtggagataacttgctggtaaccccgtttcccccttaggttagaacctacccatgaagaagaaagcaattcggaatcagctagcaattctgcagcaagacacatatctgaggacaggagagagtctgatgactcggatgttgatttgggctctgcagtgagacagctgcgagagttcattcctgacatacaggaaagggcggccaccaccatcagacgcatgtatcgggatgacctagggcgcttcaaagaatttaaggcacaaggtaagcttgccagtgtactgcttttgagtgactggaactgatggagaagcattcattaaaaagatcttaaagctgggcagtggtggcgcacacctttaatcccagcacttgggaggtagaggcaggcggatttctgagtttgaggccagcctggtctaagaagtgagttccaggacagccaaacagccagggctacatgagaaaccctgtctcaaaaataaataaataaataaataaataaataaataaataaataaataaataaaaagggtcttaaagctgggcagtggtggcacacgcctttaatcccagcacttgggaggcagagaagtaggtagatctctataagtttgaggccagcctggtctgccaatcgagttccaggatagccaaggcaacacacagaaaccctgtcttggaaaaaaaaaaaagatctcagaagctatagatctgagaccgtgtgtcactgagaccatgtgtcacactgagcagtacttacttagcactgctcgaggaatgttaaaaatccccttttaaaactgtttcctcgttgcatgtatttatactgcaggatagtgtactgtgtaagtgccctttcacacaaataagcactgtgcgttgagtgggggggctccaactctggagacaaagcattgaacaggttaagcaatacaccccaagatcctcacagacacagttacagagcagtgtcttgggggcccctttgctgaaacccctcatgttgaatcatgaggtagaacaggctgagctcaaactcttagtcctccttccttggcttcccaagtgctggaattagcaattgtgcatcaccatgccttgctccaaatataaattactgggttgcttatttaattttgtggtatgtatatatgtatgcatgcgtgcattgttttgacctggagttagccacgtaccaactactcagacaacggtcttgaatatgatgaaggtgtattgaacaccttccgattgatcaatcagggccacaagaagaaaacctaattgtggtacttgtctgtcctcagggaagactttttatatgaaaacccaggttcaaaggtgtgaaggcaagcagtgaagtagtacatttatggctaactagacaaggtgtggttagctggcctgttttttttttttctgtttgttttgtttttttgagacagggtttctctatagccctggctgtcttggaactcattctgtagtgaggctccaggctggcctcgaactcagaaatccgcctgcctctgcctcccaagtgctgggattaaaggcgtgcgccaccactgcccggctgattagctaacctttaaactgactgctcctgcgtaaggtatgaggagtggtgggcaggtggtgaacaggggaattttagaactttgagataacagagtacaaatcattcaaccataactctttggcttattaataacattcttcagtgttagttaaaataataagtatgaacttagcttcaccttgtgattaacatggagcctaaagacaatatggctacagttatgttagcaggagtgagcctctacatgtatcataaccccaaaaccagggctgaggggaaagcacttgacgagcatgcagccagcgctcagtgtcattcctagaatccacataaactgagtgtgctggtgcatgtctaaccccggtactcaggaagtgaaatcaggagtcagagttcaggtccatccttaactacatagggagtttgcagccagcctgagctccatgaaactctgtctcaaccaaaccaaacacctaaaactcgacaggtaaactcctgagtctccaagtctgctaaaagaaagaactaggtttcacacagttgatccttaatgattgcataaagaacaggagttcaatgtaaactgtattgtgttttgttgattgatagaaagtgtgtgttatttcagcaggctcatgctagcccctgtgaacaccactctcggggagtttagtggtgtggaggtagagtgaggctttagattcttctaaatgtccattgcttgttaatataactatcttaaagatattgaaaaagcaaacaagtctctgtggaagaggctgtctgaaaagacttggagaggaaagatatggtttacacttgaattgaggatggggactggggagccactctgtgccaaagataccagtgggctgctcctgcccagtgggttgctcccagctggtccgaatacagtaggtttccttcggggccctgggagatactcagtcagttaagtgcttgttgcacaaacatgacctgagttttgttccagaagccatgtaacaaagctgggcctggtggcatttgcctttaaccctaacactggggcttgctggcctgccagcctggcaaacttggtcaataggagagcctgtctccaaaagagattgatgatcctgtagtctccatacatacatgtttatacacacacacacatacactctctctctctctctctctctctctctctctctctctctctctctctcacccagagagagggagagggagggaaagagagagaaaggcagaaagaaagatgagtgtagtgggtttgcttcagtattgacagtctgtctgtattttatttcctcactccaactctaggtgtggctattagatttggcaaattttctgctaaagaaaataaacaaatagaaaaaaatgtgcaagatttcctatccctgactggaattgagagtgcagacaagctgctgtacacagacagatacccagaggaaaagactctgatcaccaacctaaaacggaagcatgccttcagactgcacattggtaagtgggggaagagacccaagccgccctcagccttcccacagctgcctgcagccctgtggtgaggaagtccttcctctgaatcccatggatttccctgtctctcaagagtagtccttcaatggattttgtgaaaaactgattttctatcctgtccatttggcagtaattatgccttcagtttctttacctgtctgtcattccttccatgcattatgatcttccaaatgaagtgctttgagccaaatccctgctcgagggctgctgagagagttaggagctcagtgggcctcccaccaatgaccccatgcccagaagttcatggaatacaaattgtatacagcggagagaagagaggaggaggtgggtcatgaaggaggcagggaaaggagttaagagtgcatatgatcaaaatacactgcataagatttattgacttattatatacacagtgtaccacctgcatgtattcctgtaggcagaaaagggcaccagattacattacagatggtcgtgagccaccatgcggttgctgggaattgaactcaggacctctggaagagctgacagtgttcttagcttctgggccatgtctctagccccccaaaatattttattttatttttattgttttcatctttttgaagggtttctctgtgtatcgggctatcgtggaatttgcttcgtagaccaggctggccttgaactcagagatccacctgcatctacctcccaagagctgggatcaaaggtgtgcaccaccaagtctggcaaaagatgtatttttagaaaagatcaataagtggtaacagatccctcatgaaagaaccacttttgaactagaagatagtaatctcacaagtgttttcagtgtacacagggaggcaggggcaggagaaggctctctggagagagggaggtagggaggcttgactgggagataatgagcttggtgcctctcagatgatgttgaagtggcaatccggtgagtggatctgcaaacccagcgtgcactgctcctcaaggcagtgttaactgtacctgttctgacagcgcaggcgcatgaagccccagcatgcctctatgtccagcatgcctctgcacactgctgcacatgacttaaccatgtcacgcagggctccagtaggttcctttggtgtttgtgaccatctcacgttggccacatgccacctctctgactgtcttccacctctctgcagggaagggcatcgctcggccctggaagctcgtgtactaccgtgcaaagaagatctttgatgtgaataactacaaaggcaggtaagagaatctcagtgctggcgtcagaagtggtcctgatggggagaaacaaagccacaagtgacagctgagggtcacaaagggttttgcattgaaacctggctagagattgttaggtttacacctctaagattaattttcactcccagttctttaataagccttgtggaattgtctgtctcctgtgtcctctgtatctttgtacctgggcttcagcactgggcatctcctgcccctcttcctgtggctctgtatgctctgctctccgctgcacagtgagcttccagcaccatggtgctcccttctgccttgtgcttcatactctccttccccaaataaagtccccagttttcatctatgtccaacattctgaattattattattattagttgttgttgtttgtttttgtttttgttttttttcaagacaggatttctctgtgtagtcctggctgtcctggaactcactttgtagaccaggctggccttgaactcagaaatctgcctgcctctacctcccaagtgctgggattaaaggcgtgcgccaccactgcctggctctgaattatttttaaaattacattttaatgtgtatttatttttcaggcatgctttttaagtgagtaagggatctgaactgaggcactcaagccgacctagcaaacatcacactactgcgccatctcccagccccgttacctccctctctcccaccaccactgcccactgtagccttatgctcccacccatagttctttcctttttaatctaaaaaaacttattctctatatgtgtgtgtgcatctaactatatgtatgtgtaccacacatacacaggagcctgcagaagtcagaagaggcataagatcgcctagaactggggttttaggctgttgtgagccaccatgcgggtgctgagacctgaacctgggacctctgcaagagtagtaagtgtagctgggtatgatggtacacacctttaatcccagcaagtgggaggcagagcagaaggatctctgtgagttcgaggccagcctgctctacatagcaagtttcaggacaaccaggcctacatagagagatcttatcccaaaaaaacaaccagaaaagaatagtgagtgcttttaaccactgagctatctattcagcggtcacctacagtccatgtcctttaggttgtgagtctgtcctttttctgctgagccatctgtccggcccactgcctgcaatgtctaataatgaagaggagtgtgtctgtggtttccacagtccccatctgtgagtgtactttctgcagacacaggagcactgctgtgctcgtcaccagaggttattgctgttcttccagacctttgtttgatcgttgtccccactacaaccctgggttatgatttagaaatctaaggttatgacaatagctattttttttgcttcagcatttatggtgtttaatctcaaaatcttttttttagtaacttatcccactttgatatttagtagaattaattcaggcacatatttaagttaagaacaaattggccagaccttttccttgggccttgcctcccaaagctatgccatctactaacagccaagtgtatttaggccgtattgccatacgtgtgagagtcagtgctgtgctgggtttagaacatacagcacgaacagccttcaacactgactgacccctggaagtagtgtgccatgcacttaggtggcacccaggcctggtatttgccaggacatgtcaagtcatggagtcacatccccagctccaaggaaggtggttcttaacactgatcatatgaatattaagtgaaggaactcttccatgtggggagtgatacatggctgggtagcttacgtgatgttggttaacagcagacagcactggtctagaggaagtagcgtaataggtccatagatgctgactgcagacctagagcagtgcaggaagagatgctcagcgaagggggcactcagctatgtgagcagtgcagcgttccctgcggggtacctgtgggttggagacagccatgtgcaaaccaccgcagaggctgtggtataagaacaggcctagggctggcgagatggctcagcgagtaagagcactgactgttctttcaaagatcctgagttcaaatcccagcaaccatatggtggctcacaaccatccacaatgagatctgacgccctcttctagtgtgtctgaagacagctacagtatacttacatataataaataaataaaattaaaaaaaaaaaaaaaaaaaacaggcctagatggtttgatgtggcctatgagagactgggtagaccttggctcttccagccgtgactggtggcataatcaccactgaaatgcatagacaggcagtgagaggctccagccatgggtgggagaggcgtggcttcctgtcagtgctgcctttagcttttccaaggttctgccacaggatgccgttcctagtcttggatttcatgaaacctagcaatcattttccttctctcaggtacaatgaagaagatactaagaagctgaaggcataccattccctccatggaaacgactggaaaaagattggggccatggtggcccgaagcagcctctcagtcgccctcaagttctctcagattggtggtagtaagtggcctctctgtgaaataagcccatgactgagccaatgtgcagaggcctctgtggtccactcttagtgtgtgctccttttaaagaccctctctatgcctgttcctttgacttctctgtgtgcactaaccatgcctcagtccataccctgctgcatgaactgctacgcatgccggtccttccagaagttggccaggagggagcctgggggagtgagatgtgtggccactttgccccagaatgttgggccttaaactgggtagagtgggacacacctttaatcccagcacttgggagacaaaagcaagcagatctctgaatttaaggccagtctggcctacatagtgaattccaggatggccagggttacatagagagaccctctctcaaaaaaaacaaaacaagccaaaaaaagttgtcagttattttcagtctgtttgagctattcccatggttttctggaaagcacctgatttatcatccctttttaatgtgcctgaaagcaaatagatgaacaactatgataccaggtcatccttttatgcctgcagctagaaaccaaggtgcttggagtaaggcagaaacccagaggctaatcaaggctgtggaggacgtgatcctaaagaagatgtctccccaggagttaagagaactggattctaaactccaggaagaccctgagggtcgcctgtcaattgtccgggaaaaactctacaagggcatatcttgggtggaggtggaagctagagtggagacccggaactggatgcagtgcaaaagtaagtggtaagtgtgaggcttcctgtgtacgcccagtagggctctcatttgtatggcctgggcaagaagtgcagtatcaggaacactccagcaccccctgcacctccttctcctaatgtgccttgattgacagtgtgcggtgtgcagtagcttctgtgctcgggtttatttcttcctcctttggaacttaaagactggcttggtggtgcacacctgtgaatccagtatgcaagaggttgaggcaagaggatcgcaagctcaggaccagcctgagtagtagactagctggacgtgtgactcttgactacatctttctacagcttgaggttggcaggtagaatttttttttttaaattaaaacagcttctccataccttatagtgtgctgaatagcaacccagaagttagagtctgcaagactgaagcaaatgacagaaattgagaaagaaacccaaggacgttagtgccttgtgtctgtacagttgtagatcagcagctgctctgggctccactgcaacgcagtagttgtagtcatactctgagctaggtaggcaggttctgttcctctgtctgcatattccttacctgctctcactttccaaagtcctggaggattgagcctgcacgtccagctacagcttgactgaagcagtggttcctcatggtctggcccacactgtccacaacactccatgatctcactgaccaagccagctcagtcagccaacaggttttccagggagggatcgaggattaaaaagaaagaaatagacaacactattgcatgaccccagccacttctgaggctgaaggggcttattttttctcagtctgattttataccactttaagtacatgcaaaatgatatcagttctgggacaaggaacaagcaaggcaataaacaaaatcccagaaacactatttctaggagctactcgggatgaccaagacaaaaggaatgccatgcgtgcctcagctgagcccactctgagctttgcattaactcaaatgtaaatattcttaatctgagcctatttcctgagtcccagcccaaagtccgattcccaccgagttttttttttttttttttttttgtcctggcccaatgtcaaattcccgccaagtttctagaagtggccccagaagctctccacaccttccaaatgagggtaaaatccattacagtaaatactttacattaaaagtagactgtgccgagccgggtgtagtggcgcacgcctttaatcccagcacttgggaggcagaggcaggcggatttctgagttcgaggccagcctggtctacaaagtgagttccaggacagccagggcaatacagagaaaccctgtctcggaaaaaaaaaaaaaaaagaccatgcatcacactgtccacacaactttcaactctgcttgggatattgggtgctttgtttgagttttattctggggatcaaacacaagctacaaaagcactccagcactaagccaagctcccagtccagtgtgtgtttatcagaaattccagagaacagctagtgttggaagtatgtaaagtatggaggaactggaaccctttcttctcgtattttagggtgaagaggggagtagactgggcctcagctggaggctgatgggtcagtgttggaaggggaatgatggaggtctgactgtgctgctgcagaaccagcatgagatgggcagggtgtgttcagtatgaagagagaaaagggcacctcagcccccaaaatgagctcaggcccagcctctaagtagagcttgggaagagcagtgtgggttagctctcgtgtgtgtgtgtgtgtgtgtgtgtgtgtgtgtgtgtgtgtgtgttatgcatgacagtacaatcctgccatcccatcactaaggaggctgaaggcaaagggccttttaagggcagagggcctttcaaggccaagacggacccacagaggaagacattgattgaaaaccagaaggcaaggaggggagagggaaggtgagggaaagtgtgtcggtagaagtgatctgtcaggctgctactgagctgtgctctttgagagcactcctgttctgtattctgactgtcagtgctcaatgggacacagactggcaacccaaactccagccccaagctgcaggctccaggagtcagcatgtgagttctcagcaaacttggcattggtgttcagaagctagcaatgggagcaagaaagccacctgttttgttatttgtttgtttttagatttatttattatttgtatgtttgagtgctttgcctgcgtatatgtctgtgtaccacatgcatgcttggtgccctctaagggcataagagggcactggagttcctaaaactaaagttacagttgtttaattgcaggcttttccacctgtgccccagttctaaaataagagctctgagatgtaattatatacgactagatgttgaggccataagcttgggcttcttccccaactaactcatagcttagttaacctgcttagtctattctgtgagtgccacatggctggttacctcttctcagttttcctaagcatttggggtaaatctcttcccacctgccttagtcagggtttctattcctgcacaaacatcatgaccaagaagcaagttggggaggaaagggtttattcggcttacacttccatgctgctgttcatcaccaaaggaagtcaggactggaactcaaaaaggtcagggagcaggagctgatgcagaggccatggagggatgttctttgctggcttgcttcccctggcttgctcagcctgctctcttatagaacgcaagactaccagcccagagatggtcccacccacaaggggcctttcccctttgatcactaattgagaaaatgccttacagttggatctcatggaggcatttcctcaactgaaggtcctttctctgtgataactccagctgtgtcaagttgacacaaaactaaccagtacaccacctgactctatcccagagttgttctttccctactggaactcccacctcctatttcctgcctcagctcattgaccaatcagctttttattgacaggtaatgctttcatacagtacacaagagattctctccacacagttgtgagccaccatactagtactgagaattgaacccaaattctctagaacagccaatgctcttacctgctaagccatctcttcagccccaatagccatttataaacaatcacaagagcatttgcatagtgtcttcagtgcctataaataaataggcttattccatttctctcaaaaattccatttcctttatggggctaaagagatgtcctagtgggtaaagcatgaggacctgagttcaaatctccagcacccatgtaaaataaaagccaggtgtctgtagccccaacactaggggtgggatgggagctggaggcagatccctggagttctttgattttccctgactcaacagtgagtaacaataaggtagagagtagtagagagggacagccggtgctcacctctagctccaccacatccttgagcacacacactcatgcagcttctcccaacgcaaagaaaccaaacccctctggtcaagacgttgtcaggtcctagcttgtcacctaacggatactgcttaacaggaaagtcatgcactctgggaagagtaacaaacagttccagggttacacgttggctctgttactagcagacatattacgttcacacctggcccactaactccacaagccctgtgtgttttaactcaagtagggacagcagtgtccctcctggtgcagtcttccagcgcagatgcccacttctgtaaaagcttcacgtcctgcaacaccagcagttcagaatgttctcattagtccacaattaattgggtctaaaaacagtcttatttccactaatacgatatcacgaagtacagctggtgagtcagcagaggagctgaagagaaaacatggaggcgagaaggacgggcatgaggggaatgtgtgtaacttacacttgatgcaaacaaaggccattgtacatggaagccagcatgctgaaggttttaagctgcatcataaaaatagtattgataggtatactgtgcttttcagctgaaacattccacttttatagagctagtaatgatttttcatcaatcttcatgagtaaaaccaaaaattgtcatttatcaatttgaaaaacaatttccgttatacaaatttcataccacaaaatagactctctcatgcccattatccacattaaaaaatgatgaccactttatcaatttatttattcctgcccagtgaatgagagcaatttatgtgataaaaatatagaaaagttgtacttttttagatatttattttatgcatatgggtacactgttgttgtcttcagacacagcaaaagagggcatcagattccattagagatggttgtgagacacaatgtagttgctggtaacctgaactcaggtcctctggaagagtaattggtgctcttaactgctgagccacctctccagcccagaaagttgtacttttaaaactaaaattaaacaatgcttttctttctcttaataggacagagattcttaccaaaaggatgacccatggtgggttcgtgtatcgtggggtcaatgctctacaggccaaaatcacccttattgaaaggtaccaaaatagggatgggtgcttgtgaactcttatttgttaatccagagactagggtactgttgcttgcacccattgtccacgtgtgtcacaatgggtgtgtgacctgcttttgagagcctctgttgaccaactctgaatgaggctgagaaagagaagttacttgtcgcctaatgtttttgggagtatgggggacagacagtgcatggcagccatactgtgtactcactcagtcagaggcttgttgctgaatagtcaccccttagctctttctgaactctggctggctatttcaactcagctgttctagcccaaattcttttctacattgactgattcaaacaggcttttctcttggcttctgactgaattactctgcttggcctcatagtaacactagcaatcagttctaatttttctggctccttctcattctctggatcattctgtctttacctgcaaactgtctctctaaaactgtccctataaaactaccacctccttctcttcctctcaccccttcttcccctcctctgctgctctcttaagttgcctctttcctctctcttttcatgagagttggacatatcctatcttattctgtcaaatctttttctgattcatcattttgtctgcccctcagttagatttcactttcaaacatggctgcttccctctacatctaacttcattgtttgggattaaaggtttatactaaggacacgtctatatcccagccagagggattgaaggtgtgtcattccagctgtatcacacagacccagaaggtctttggatgggatcccttgccggagcagccatgttgctggattaaaattcctctgcactgcagtacaatgacactgttagtgtgacttgtgtgattttgtcctgagttccctgtctatgcggagtcctcatcacagtgtcccaggggaagtggaggatgagactctctgtaacagctgagagtgacagacctaggccaggatgctggaagatcagcgagagcagcagaggcccttggttgtggccatcctgtctagcttctagtcccagaactctgccatgcttcctgtgttgcactgactggctgtcctccactcttccttctgcaggagagacagatgagcagatctgaggagatatctcaggttagacaggactgagatcctgggtctcacagactggtaatcatgacaaatgagttcgtctgtagaatgggactgatggcacccccctctgtacactgagggccactctgtgtgagcagtgcacatacgatgctagtagtggcttgaggagtaggcatgagcacagtgtactattcctggggagctgtgttgaatagagacgtggctctttagcctatctatctctataactagttctctgaccttggactaaccttggctgggacggacagtgtagttgagggactggcatggggtcagtgcccttggctttgaggtcttggtattctctgaacctatggaggtggatttcactcgacatttttactttttcttacaggttgtatgaactaaatgtgaatgatgctaatgaaatagactgggaagatcttgctagcgccatagggtaagaccactcattgaacagtaagcttattcaatgataagaggtttcaaaatactttgtctttatggtgtgtacatgtatacaagtatgtgtgtacatgtgttcagtgcgtacagggaggtcagtctcaggttacaggttctgtggcagcaggcacccagagataacttttagtatgtggctccctatcacacctcaccaggcctaaaacatggcgtgtgtgcaattgtgtacaagtgcaggaaagtgcctggagagggatctcagtctgtagtgtttgcctccggagcataaggatctgagtgcagtctcatcgtgtatcaaagctgacagcgacagggtggtggcacatgcagcccagtgctagaggggtgggcacagatccaaggacacacacacacacacacacacacacacacacaagctccagactgtctcaaaagattacagagacacgatagagaatacttcagcctctgtcctccacatacaataccttcgcatgctatgtcatctctgcaccttgtgcttcactttgctttgttttctctgtgcaggatctcgctatgtagcccaggttggcctcaaactcaccatctttctgcctttaacttcaaaaacctgggaacttttcagggctagctattcacatccagaagcagtggaatggtgttgctgattgacaagtgttccacagtccctggaattctcgcctgcaacactgaaggaagtcagggcaggaattggaggcaggaacaaatgcagaggccaggaacactgcttgcttaacctgcctccttatagcactcaggttctcccacattcagaaacctgccccacatagtccagtttggtgggggcatttctccgttgaggttccctctttgaaaatgtttctggtttgtgtcagacataaaagtagccagcacagtttgacttttttttgttgtttttgttttttaaatagaaaataggttacattgtgcagaataagagaggcatggaaaggaacagtgtgagtagccctctgaccacaggaaaccagccagagagttttctggtcccttcccagagcatttgtgcaagaggctacagaccctggaacatgtccaaccatcagaactcacggtgccctggaaccacatctgaccatccgagctcactctggccctgcacttttctcctccacctgcagggtctccagggactgcctttcagagggcagctttgagggccagtctttttataatggttcctgttttcattctctcctcgctctctctccctctcctaccctcttactgctctggctggcctgacctccctcctcccccgccacccttctctttgttattcttctgttgctctgtgagtttgtttttcagcttctctaataagctctgctttttcctaagcactgctttatcaacagcacctagtagtttttaaccttttatcagaagtttagacagataaagaaacagatgaactataccctcctcaaaatctggtcatgtctgaccagctaactcagctttgtctgtctcttctgcttgttttcttttcttagtaaattatatctgctttatagccttgctaccctgcaggatttgaaaagtctctgagtaattccatttggaaatcaataatactgtttctagaaatacattctacagaatccaactctcagtgtacttggagtgagttatgtgccgaataacccactgtgctggcatgcccatgattggagagggactgagcatgtggcccgcccggctgcctagcatacatagagccctgggtccttcccccagcaccacatagactcaggtgccaacatccatgggtaaaggcagttgtcagtgttctgagttgctcaggacaatccaagtaagagggtcaagcctgaatataatcctgctctaaggcagtagggaggtccagccaagttgttttttgggtaaaacaagtttctcataccaaagcccctaatctaatctttgtgtttcatgaaggaacgcagcagcaggccctgcaactttaatcctcattgcttgttgtctgcagtacccagtaatgcaagacattccaggtgtgccaggactgtcttgtgacaaaagtcatgcacagctgtgaagctccttcagaaatacaactctgtagataacagaaaagaatcactgttttccacaaagatttcttcaaggtcaaagtatttctagaaaacaattctttatcctgctgtctactccagatacagtgaaaaacagctatttcattctaacatttaccctagatacagcgatttactaactaggattgcattacaggcaggaggatctggagtcatccctggctggatagaatgtcccaggcctgcatatgtgagaccccatcataaaaagaactgacagtatactcattgatgtttttttcttacctttcctttctaaagggatgtccctccaccttttgttcaggcaaaattttataagctgaaagctgcctgcgttcccttttggcagaaaaagacttttccaggtcagtatacaaatccttgtttagttaagagtctagtgttgtcccagtgtggtgatcccagcaatacagaggcagaggcatcaggatctctgggagtttgaagccagcctctactatacagcgttacccaagccaaatgagatcctgtctccagagtctccaccccttcaggctgagcccagggctctgacaggttctcagggcagtgtgctgtgctctgctgcctcataaaggtggtattcctggagccacaggcaggggctctgtcctgaagagtgtcctgaagcgctgttgtatactgtgcagacaccaccacctagctcacctcctccttgggtccatgactagtgcctcagtgtccttattgcacaggtcgattagagggagctggggaattgtatcagtgaagcgtttttttgttttgttttttatttatttattacatgtaagtacactgtagctgtcctcagacactccagaaaagggagtcagatctcattacgggtggttgtgagccaccatgtggttgctgggatttgaacttcggaccttcggaaaagcagtcaggtgctcttacccactgagccatctcaccagccccagtgaagcatttactatgcaactgtatatgtacatgtgaagctgggcggtggcaatgcacacctatgatcccagttctgtagagacaaagacaagactctagccgagtctaaaggactgtccggtctggagaagtaaggcagagaacaattgaggaagcactgacatcagcctctagcctccacacagatgtgggcttgtgtgtacatgtgtgtacacagagacatgtacattggagagtcacctgtgctgctgctgatgaaagaataatgtctgccttgtagggtttttttcaaagaatatgtaagtgactgtgcaccagataaattggatcttccatgtgctaaaaggtgtggttcattattgttaaggtcctgcaacctttgaccttaattagaggcttataccttttctgcagaaatcattgactacttatataagaacagtctgcctttgctgaaggaaaagttagacaagaaaatgaagaaaaaagacggccagatccaaacacctgcagctcccaaacaagactttctgttcaaagacatcttccattgcgatgatgacagtgatgaagggagcccagaggagcccaggtgagtacaggtcgctgactcccatcttgttccattaggttatgtgtgcacgtgtgacagtcagcgtctcttcacaatagtgcctaagtagctcacctcagaatgagaagaggtcgccgctttggcttttctttctgcggctccagtccatgccttggtgctgttgctctgtgcctggaggtagcacacatgacagcaaatcctttacctcataaccaggaagcaaaagagaacaagggaatcccacaatcctttcaaggctcacctccattggctgaagaccttcagtgagcaaccaccatctcacactgacgctgcccaggggacctggcctttaatgtgtaagccttaggggagtggtccagagctgaccaagcaggaggatcttcagtcctgatggctgttaaaaatggtgtgatgggcacatttctgagtttgaggccagcctggtctacagagtgagttccaggatagccaaggctacacagaaaaaccctgtcttggggggaaaaaatattgtgatggctggtggatctctaagttggaggccagcctggtctagagagcaagttccaggacagctggggctacatagagaaaccctgtctcaacaaagcaaataacaaacaaaatgtaatggagctaggtggtggctcacaccttactccagcgctcagaaggcagaggtgagcggatctctgggttggaggacagcctggtctgcacagtgagttccaggatagcctggactacagagagagttccaggacagtctgggctgcacagaacccctgtttcaaacaaacaagcagatgtgctgggcaggtgagcatgaaacacattgggggctggagagaagaccgtgccagtgtggtgcctgctcacggtggcatcagatcccagcactcacataaagagctgggcctggccatggtgctgcgtgcatgctatccacgtttgggctgaggaacaggaggatcttcagggctaggtgaccaaacttcagcaagtaagcaaaggagatgacctgaaaagctgaggaccaccaccagaaattgtcctctggactccacatgaacaaacacacacacatctttaaaagtgttagtttcatgttgatgttggtgtgcttgtgagctgactgaatactctgtaccattgtattgaagcagttacactgctggttccattgaaccagtgcagccaccagtcctaggtgcatcagagaacattacacccagtaaaatgagaaagctgcctcccctgatggctgtcactgtgctctcttccagcgcctctgatgtgcagtgactggatcgtctcttcctcaaactgctctctgttcccttggacctgtgttgtgcattggctatagatcccgctcgcatgtgatacctctcctgtgctgggcaccgagtcacacggtgttctgctggagcattggtagtctgcatcggagcccaactggtagccttgaagagtctgtcagctgaacacagccccactggattctcaggactgggtgaaaggggtgctctttggtcaatcaggagagtcaacccaactgtaggggcttcagagaagaaaacttagggtttgggtaagaagaagtattccatgagatctgtgcactatggagataggtgggggagtgggaagtggggtcacaggattgaagccaacctgggctacatagttcctccagcatatacacacacagtgggatgctggagcatcctccaaaaggagaagtgcattgcccagagagcaggagagtactgcagagaagctctagctctgcaagccccaatttccctgtgttccttctagctgttcccatactcaggctgtctgttgttgccctgcagagaaatgtgtccatgtgtgacccttagcagaacactgctgcaagggagtctgggacacccaaatgttcagacattcagacttctgccccatctgtgctggggagacagaagggaaagtgaggctaatgaaaccgcccatatactgctgtctacgttggtgccactcagcaatcttctgtctcccgagaactctcagacatgatttctgtggcactattagaaggtggactagagggctggtgagatggctcagtgggtaagagcacccgattgctctcccgaaggtccggagttcaaatcccagcaaccacatggtggctcacaaccatctgtaacaagatctgactccctcttctggtctggctacagtgtactctataataaataataaatcttaaaaaaaaaaaaaaaaaaggagcttctgcttgccatgtacctagcacttccccagatgtgcagataacggagtagtcaggtggaatgcactaatgcacccagcattcatgtggggtaggaggagcgggaggtcaaagtggtccttacaaatagcaggctctaggccagggtggcctatagatgactctggctctaacaaacacacaaataaaacattgtgtgaatgatggtattttagtacatggttctctacccagcccctctgtccctcaggcattctagactctgtgctgacaggactaaattgctcctacaaaaataatagtactaatgtataagccaattctatatttgtgatagaagaaaaaatgaatattctttaacaggaagtatgttcctagaatgggatatcatatggtaaattacagtgataacaatagatctggttgacatgacgttatatttttgtgaagtatttcaaaagaatatatattttctcagttttataaaaatgaaaaataaaagaaattggttgtttatacaaatgtgtgtgaaatgacttgaagaagataatggctcattatacatttgacagattagaacccagagacctagagcaccatgagagtctcagggagctcccaaaactgggtgacttggaccagggtcgcagctcctccatctccatccctggggtggctttctggggtttctttgaggctttcttgcccacacaggatgcccccacagctctgcctctggggcagcaacaacagtctcttctgctcctgctgtgcccttagctgccattcctcaggttcacatgagagttcataccaggcagagctgttagcatggccagcagggtatggatggctcagctttgagcagagaaggcggtgccccagtggagagtcaggagcatcaatagcaggatgggctaatgggctcccaagaagcaactcacaaagcaagtaacagctaaaggcatggcgtttcccacaaagcttgtatgtgtgctgtgtaaatgtttgagattcttaaccttttccttgcctttctccaatacacacgcacgcacgcaccaggaagctgcttagatcttacctttgccaccaccaccccttccctgtccacccaccagctactcttttgtagtaacaatcatgggatttggagaaaaatctgccagagtatgaggggaagagagtgtgtggtctagaaccggggagctttgggggcaggtttgaacagaccctgtaggcagccgaagcctaaaagatggcacccgtttccggtacatcattgcagtaaacaccaccactgcacaggtgctagcccgaatctggcgccaacccctcccgagcaggtgcatgcaaattaaggtgcccgcagactgaccaatcccaggaggacacaaagcttttccctgtgctggggtgtatataaggagtcctccctgggtgcctggggttcccgtagcagcatcgaggcgaggcattcctgcaataaagctgttgagaagaatccaaccgtgttgtgtcttccttgccggacgaggtgggcgcaacaaattggtggcccgcacagggacccgaggatctcgtggattcagaactcttcagctgaggaacggtggtactggtaagtctcccaaattgatccccggttaaaagaggggatatgtttttcttgcccgtggacccagtgtgggtagctcttatcgttgttcgtttttttgtaatttctggcctctgcttttgtttgatagaagcagttaaggcaggtcagaaaattcttacggaacaacaagaaagtatgtcagaggaagataggaaacacataagcaaaagaaagaaaaggggcaaaaaagagaaaaggagaagggagaaagggcaaattcaaaagaaaaaggaaataatgagaaagaaaaggaaatagcaaaaagatatccctcattaaaagacttaacagtaagttcagcaagttctgactccagtgactcagagcttgacaaagatgaggaagctgacctagaagaagaggcagctcggtatgagagggataggtaagatccagattagtcatacaaaaccaatcctttaaaaaaaaggggggggggggtcggctggcaaaagagtaaaatcgaaagtgctgaccgctccacctcttaaccctgagtatacaggaaaaaaggaatccacaaaagctggtaaacaaggtacctcattttgcccagaggtttggaaggaagttggactgactttccctgtcttcttagatggccagggacaacagcggtatcatgagccaatagattttaaaactattaagcaactggctgagtcagtccgtacctacggggtgagtgcagcttttgtagttgcacaggtcaaggcgcttgctagatattgcctcaccccgggggactggaataatattactcaggcttgtttgtcgtccagacagtatttaaactggaagtccttgtcctatgaatatgcaaacagtcaggcagcagcaaatttagccacaggacaagatcctcagagacactgggatgcaaacatgcttctgggtttaggacgttttgctttagatcaaacaaatcctgaagcagtctatgcccaaataaatgaggtagctaccaaagcctggaaggcattaccgaacaaaggcgcagtctcaggcaatcttacgaaaattttgcagggccccacagaaccattttcagattttgtagcatgccttgttgaagcagccactagaatttttggagaccctgatacagctatgcccttggtaaaacagctagtgtatgagcaatgcactaaggagtgtagagcagctattacaccctataaacataaaggtttagaggtttggatgaaggtttgcagagaactagggggcccgttaaccaatgcaggcctggcggcagctgtaatacaattgagtagatctaataatgatacttgttataaatgtggtcagagaggacattttagaagacaatgccccgaaaatgagaaaaggactccattagataaacctagacagccaggaatatgccataaatgtagaaaaggaaaacattgggctaatgagtgcagatcaacaaaggacatagaaggccgaccattacaagcaggatatggtggcactaggccaaaaaacggacagcgggggcccatgtccccaaggccctcaaatgtatggggctcttcagaaagaccagaagaaaccttggccatctctctgtcatctgagagaccacggagagccactactggctccgcaggattggacctccactccaccaccagactcgtattaaccccacagatgggggtacagcccatagatacagattttaaaggcccccttcccaaagatactgcagtactattgcttggccgctcatcttctgctttaaaaggattacaaattacccctgaagtgactgatccagattatacgggggttgtgaaaatcttagtggcctcccccagtggcatttcagctatctccccaggagatagaattgctcaattattactgttgccaagtttgcataaatattttccaacaaataataagaggagagagtgggctaggttctataggttcttggttcactttcttttcaatggaattaggagatcgccccatgttaactttggaggttgaaggacgatcctttctggggttgttagacacaggtgcagatcgcagcatcatctccactcatgattgactgccaaaatggccttcgcaaacatcatctcaaagcctccgtggtctaggttatgagactgctccctttataagtgctaaggaattgacttggaaaaatgaggaaggtaagtcagggaaattttttccttatattgtggatattcctgtgaccctatggggtagagatgtcttaaccaaaatggatcttagactaactaatgagtattccccacaagcctgagaaattatgtctagtatgggctacactccaggaaaagggttaggaaagttattacaaagcatgagtatgccagtgcctgcaaagttcaaacaagataaaaagggattgggtttttcctaggggccattgagggtggtatacccattacttggaaaacagaggagcctgtatgggttcctcaatggcctctttcctctgaaaaattagtagctgctagagaattagtagaggaacaattgaaattaggacatattaaacctttccagtcaccttggaatacacccatatttgtgattaagaaaaaaatcaggcaaatggaggctcctgcatgatcttcgagccattaataatcaaatgcagattatgggccccatacagaggggtctgcccctactttttagtttgcccaaagagtggcctattataatcattgatattaaagattgttttttctctattccccttgcattgtgtgatagagagcgctttgccattactctttgttctgtgaataatgaagagcctgataaacagtatcagtggatagttttacctcaagggatggcaaacagtcttactatgtgtcaactttttgtaggagaagccctacaacctgtccgtgatgcattcccaaaattaaggatagtacatgatatccttcttgcctcaaagaataaagaaagtttagatgaagcctatattaagctagtaaaagaattagaaatgaaacaattatttatagctcctgataaagttcaaatgggaaatttaggagagttcttgggtgctcgaattactccacattttattacacctcaaaagatacaattacgtaaagatcacttgaaaacattgaatgatttccagaagttgttgggagatataaattggattcgtccatatagaggctatcaaattttgaattaatccctctttttgatatattgaagggtgatccacagcttttgtcacctcgtgctctcacccctgaggcccgagtagcattagaaaaggtagaaaggtgtttagaaaaggccaagctgtatagatggaaagaaggagaagacatcctcctatgcgttttgaagacattctgtcaaccaacaggagtgttgtggcagtcaggtcctctactgtggatgtaccctcatgtgtctcccaataaaacccttgaatattatcccattgctgtagctcaattagcgattttgggcattaaattgtgtattcaacattttggagcactccctcagaaaataattacaccttataatgctaatcaaatacagatcctaagttctttgatagatgattgggccctattgcgttgtagttttgatggggaattagataatcattatcccaaagatcctttgctacaattttttagtgaacatccagtgattttccccaaagtcacagcatctaaacccatatcgggtgcattggatatttatacagatgattctaaaacaggtgttggtgcctatgtagttaattctcaaaaacctgttctttttcaatacaatcctggcaccccgcaacttactgaatgtaaaattgtgttggaagtattcaaagcttttaaggaatcttttaatctagtctctgattcttatgtagtaaatgcagtgcatgcattagaaattgcaggacccattagactcaccagccctgtgtgcaccatcttattagagttacaaaaattgatttggaaaagaacacataaattctttattcaacatattcgagctcactctaccttgccaggccctatggctgaaagaaatgccttagtggacactagtactcctatggaatttattttccatgccactccactcgagcttgcaaaggactttcatcaattgtatcatgctcctgctgccacacttcagcagaaatttgatatctctcgagcctcagcacgagatgtggtgttacaatgcccacagtgtgtgcaatttcaccaccctcctcatgttggtattaaccctcgtggattgcttcctctaaaactctggcaaatggatgttactcatgtctcagcatttggaaaattaaaatatgttcatgtttcaattgacacctgttcaggtgtcatttttgcctcccccatgtccagtgagcaatcccgcaacgtggttggccattacctagaagcctgggcagcttggggaaggccagatagtttaaaaactgataatggccccacatatacatcaaaatcattccaaaccttttgcaaaataatgcaggttagtcactctactggccttccctacaatccacagggccaaggcattgtggaaagagcacatcaaaccttaaaagaattcttacaaaaacaaaaagggggaatctctgatggccggccacccaaagaacaattagccctttagccctctttactttaaaatttttaattctggacgaacatggtcgttcagctgcagataggcatgccatgacctggtctatccttaaacaggatgtcaaatggaaagatgtcttaacaggaaaatggtatggcccagatcccgttatttcgagatccaggggagctgtttgtgtttttccacggggtcaagaacacccgatttgggtaccagagaggctgatgtgaaaattgctcccccccccccgacagagatatagattgtaatagttccagaaggacatggtttttagcagagtattggcagggtatactgtgtggttgtgaaacttcccaccttcctgcctatagtagattttgaaatgtttgccacctatgcccattgatgctactcactgagtggtccaatttgaacctcttttcctcaaatctttgcttctgtgtgagaatgagttcattcaccaagaaattaggatagagatggtcaatattgtccataacataattacactcgggacatctattattgtcctccaaactctgaagaatacacttgtagcaaaagctgaggccacattttgtcatgtatgcctcctcagtcatatcaaagcagatgggactctctcttatttaatagacttagttcaagaacaggttgaagaattgtataaagttgtacaagctaatttctctcagtctcttgaacagagtggcctcttatctgagtaccttaaaggaaattggtcggctaaagaggagcagttgtccagaaagctgctcctccagattgccaaactcaacagcactcgactggaccctgtcaccttaggggacttcacctcctggatcaccaatgccttctcattttttaaggaatgggcgggaatgttggcctgggggacagtggtcctcctgggttgtgtcttttgtatctggctattgtgactcaaacgagagcatgtataaggcagtggtgtaccaagcattgatggcgattaaagatggcgcatcccccaatgtttggctggcctctttaaaaaattaagagtttgccctaggtcatctggcagttgtagtcacacagatccacggtatccagtgacaggcagctttccttatgcacagacaaacctaagacaccgggcctggaggcgatagggtaaccctatgacaggtaaggctgtgacatgaaaggatcgacctaagacaagagccgtggccgatggacagacttgcccagacctagtctagcatcatattattaaactaaaaagggggagatgtaggcagccgacgcctaaaagatggcgcaggtctctggtacactgtcaccatcaataacaccactgcacaggcgctagcccgaatctggcgccaacccctcccgagcaggtgcatgcaaattaaggtgcccgcagactgaccaatcccaggaggacacaaagcttttccctgtgctggggtgtatataaggagtcctccctgggtgcccagggttcccgtagcagcatcgaggcgttcctgcaataaagctgttgagaagaatccgaccgtgttgtgtcttccttacgggacgaggtgggcgtgacaagacccctgttagggagtggacagaaaggaagggaccctagtttggttgctcagtccattaatcagtgtagctgattccatgcagagttgaccttgtcaaaggggaggagagcaagttcaaaggaaggagtgtcttctgatgacacttgcagggccagtccatcattgatagaagtcagggaaagaactgacaacagaaaccatggaggaacatggctggctaggtcactcataggccaatgctcagctagctttcagagggtaggaagtgaggacaatggtcggataaagaaaggtgtctttcccacctgggaaggagctaagactccacacaactggagtgcccataataaataaggccatccaccaaccagggccattctctgaacagtgacttttttttttctatttccatccaacaatatcatccatggggttggaggtagagttatatgctgtctgaggcatgaaaatgaaattggaagggatcaaaggaagaagtggtccaggaacctatggagagaccagcttaaagatcacccggcagcccagaagctttggagacagaccctgcccgtgcaggtgcttttttgctattgtgggactctctggaataaacactccgacaccaattagaatggacgagaggagatgtcacatgccacagtggaccaaagctagggcagcacctgcaaggcattgatcttgggtacagtttgcagtctcatttttatagtctaaaccacaaggttgggtgaggttgtgccagcgagctagcaatctgcatgttgttaagggcaacgacccattgttttagctacttctccaggtcgctgtgttccgtgtacaagcgaagtcatgcaaggcaaacagacagtacaagcagtgctttaagtaaatcactgaataaatcgatgaatctaataatctgtctctctgtctttttttttttttttttttttggtttttcaagacaggttttctctgtgtagccctggctgtcctggaactcactctgtagaccaggttggcctcgaaggcgtgggccatcattgcccagctactgctgctttctgcttcagtgaacttgtctcctttttctgggtctttcccctttgatcagttattttttttttgttttgttttgtttttttgtttttcgagacagggtttctctttatagctctggctgtcctggagctcactttatagaccaggctggcctcgaactcagaaatccgcctacctctgcctccctagtgttgggattaaaggcgtgcgccaccacgccaggctgatcagttcttttttttttttttccagtaatttatttttttattcactttacatcccatcacagcacccccttagcagtccttccaagcgccccacacacacacactgctcccatccctttttctcagagaaacgagttccctcccttgggtaccaccccaccctgggttatctaggcccagcagttcactgttcacccttgggaagaaatggacttctgggtagacagcccttggctctaaagccctctctacaggaccactgcctaggtatggttcaacccacagcgggccaggcctgttaattacaaggaagataatcagttccccaccagcaatccctcggttgagattctttcactggtactctgcactgtgtgtcaaatggacaaagctaagggccctcccaatatggagaaggccaaccccttaattatgtctctaagaagctaagctctcccccacccccacccccacccccacacaccaaggacttaactttgctctgcttccttttatgcttcagcatttgatgtgggtcctgatttttggttcttagtcactgtgaggctcctgctatgctgcctgggagatgagctcttgggaggagacggaggctgacttagcctcttccccagcaccagaacagtgtctaggctgaatggatgagtgaagggggatcgacagagccaagttggtaaacaataaactaaataccgacaagaatgatacatgccacaaagcctcataggggctgtcatttacgggcaaatgaatgcaaatttaggcgtcaggatctttgtaagtattttgagatattccaaaatcagctgctaggcactcctaagatgaattttctttcttcttttttctttcttcctttctttttccacttgtttatttgtttttccaggcagggtttctctgtgtatccctggctgtcctatcctgcaactcactctgtagaccaggctgacctcaaactcagagatctgcctacttctgcctccggaggcatgcatcgccaccactcagccaaggaaacattcttttctttgtttgtttggttgttttttttgttgttgttgttgttgttgttttcgagacagggtttctctgtgtagccctggctgtcctggaactcactctgtggaccaggctggcctcgaatttagaaatccacctgcctctgcctctcaagtgctgggattaaaggagtacgccaccacacccagccaagagggactttcttaatgctattgtttgaagcaggaagatccaccctaaatgtaggccacaccttctggtggcagccacataaaaggacaaggaagatgaaactgattttgccagctgtgtttactcttgctggcaagttcatctatgttgctgcagccaatatgaaatccagggtctttaggatttcagcatagactgaagaccagctctcctggaaccatcctggactccagcactgtggacagaacaattagtgattctcagcttttcatttgtgagacagccattgttgaactacttggaccacaccctgtaaaccaatctgctgataaatccccatttgaaatatatgtgtgtgtgtgtatgtatatatgaatatatctggcatgcatctggagtgattgttatatgagatttgatggggttattcttttgaaggattctcagtctttgcaaaacttactttccagatgtgcctggcaaaccaggaagtctcctacagctggctgagaattgcttaggtaatggttttttaagacaacccctaaagcagaaaagaaatgttaaaatttggaaattgacttgctaaaagtacattttgtgtaacaatagcttctaggggttgggcgtggtggtgcacgcctttaatcccagcactcgggaggcagaggcaggcggatttctgagttcgaggccagcctggtctacagagtgagttccagaacagccagggctannnnnnnnnnnnnnnnnnnnnnnnnagagagagagagagagagcttctaggaagctatagtgttcagtccttgagagaccgatccccctgctactgagaagcctaaatccatcctacagagtatctctcccaacccatcaatgatcccatatactatagaacaatatatatatgtatatacacatatatatgtatgtatgtgtatgtatatatgtgtgtgtatatatgtatatatgtgtgaatatatatgtatgtatatatatattcatattcattttattagcgctgatcctttagataactcttactaatacaatattagtaggccagtctcataggatccttaaaagaaatgagttggagtaattagctccagtttaccttctgagagtacctccaacgtgtctgccccaccctaccccctcttctcagagacttgctggcacacacaagaagaactgtgaagagtgaacagagacttcctcaaggggagaatcaagacaggctgttagtatgtacagcctcactgggctgcgtgtcccccaccccaggcaagctggcaatcaatgcagggcagtgggggaggagctttacaatgctcagatggccccggagcacactaccacggcacagcgtgctgtatccaatgggaccggaaagagtcataaacccagcagagctgattaacaatgacccagcctagctgagccacagatgcagtcacagcccttgtgtcttgtgtctcccactcttggtcttgatctccacgtgttgtatgcttgcggaccttttaatatttgtacaacttgggaatattggattgatgggaaatttcttatgaatcatttgtgccttctcccaggagtgctacttctaagcgaccccaggaaagtcctgataatattacccctcctgcttttaggaaatatccttttctgggcccaactgaaggtctttcttatgcctaggaggttgtgactcacaaaaagataccaaagctctccttatgaggctccactccaagatactcttggagcatctgcccaggatcaagataatacaaacaaagtaaactttaaaggtaagcaaaatccagtgggctagaggagttggcagcagatcagatccaaagcctcttcctactctaccctccggcaactgtgtggtatataagatcgagagctgcatatagtatggccttccagaaaaagatatagcaacaaagataggctggagccatctctgcactacacaggggcttagagtgatggacaaagaatggtgaggatacctgacaacagaatgaagaattaagacctccccttctgcgggggtgggggggtgggtgggggggggtggcactcgcctttaatcccagcactcgcactcgggaggcagaggcaggcagattttcgcccaatcatagggcgaagatttagagacgcgatttccgggttccaggaggaagaggcggagacaagatctagaaaggggcttttgggcctggagcacagacaccatgtaggctaccggaagaattctgatataagagagctgatgagtgcccagcatggtggcacacgcctttaatcccagcactcaggaggcagaggcaggctgatgagtttaggacgataggttccgcacccagtggttgtgttatctgcctagttttaaaatattaagtctgtctgatgttttccatctgtgttgactcaggtgggcaggctccaggcattctcaggagggacggttgttggggggcctagcagcctcagccagaggatcaggcaggatgtaggagctaagtcgtgaggggccgcagcactgggcaaggagaccaggctaggaggacatgtgctttttaaaatcacacacatttgtctagtgctttgaaattataaatgctgccagactaagaatagggtgcagtatattaagtatgcatgctttggcagaaaaactcagattccttgaaattgggttataggtctgataataaaaatcacacctgttctttctgaacttggtaattgtaactgaatctgcaacttcagacctgcaatgaaaaaatcaaacacatgtgcagggaaaaaatgatatgatttgtatttcttgggaaatcatgcctctgtcattattttatgagatctatataaataaagaagcaacctgattgctagtcagtcagagctgcaagagtcttcagctttgctgattcaatcctccttcaccaactctttacctcccctctgggacctggccatccctggggctggcctccggcacccccatacatatgaactgccacgggtaaacagtttctgaaagaagggatgcctgggcgcagcagaaacaaacaactgcctcgaagtcaaatcctggctccaagctggtggcctaggctctgctggagacagggtcccagcctgccttctctctgttcatctgctttctctagagatctccagacagctctctctgttctcagttctccaagcagttctctcctgcaaaattccctggctaacttgtagaccacaagcccagtcttttattttacatatcaatccagtcgtttattccaggttcccttcggttatcctatgaatcagcatcctgtggcccagccccatacttttgctttcacttttgcaaaagaattccgcgatctcccctgtgggcaccgttcacagatcctatctactactgtaatagacattcttccatgaatgtgtagtatgtatcagtgtgttcggaatccagatgaagattccctggaactggacatgggctgccatgtgtgtgctattgaatgaaccaaggtgctatgggagaacaaccactgagccatctcatcttagcctccaaacatgaataaagttttgttctcttggaaaaaaaaaaaaaagaattcagagatctgcctccctctgcttagcacggtcaatgagctagctgggtgggacacagacatgaaattaccatttctgccctacctggtcctggactttgtcccaagctgacattgaactcaggaatctgcctgcctttgtatctttctgacaagctggctcattaatgcagctacctttgttcctttagatttgtgaagccactcatataattcatattgtatccttatttttgcatagttgagagagatggctggagagatggctccgcagttaagaacactgactgctctgccagaggtactgagttcaatttccagcaaccacatggtaactcacaaccatctataatgggatctgatgccttcttctagtgtgtctgaagacagctacagtgtactcatatcaataagaaataaacctttgggttggtgagatggctcagtgggtaagtgggtaagagcacccgactgctcttcctaaggtccagagttcaaatcccagcaaccacatggtggctcacaaccacctgtaacaagatctgacgccctcttctggagtgtctgaagacagctacagtgtacttacatataataaataaataaatcttttttaaaaaaaagaaaagaaataaacctttaaaaaaattataagggcgggagagatggctcagtggttaagactgctcgtcctaaggtcctgagttcaaatcccagcaaccacatggtggctcacaacgatccgtaatgcgatttgacgccctcttctggtgcatctgaagacagctacagtgtacttagatataataaatcttaaaacaaaacaaaacaaaacaaaacaaaacaaaacaaaacaaaacaaaacaaaacaaaactgggtgcaccagcatctgtctgtaatcccagtaccaggctaagacagagagatccctggaacttggtggtcaaccattctacctgaattattcaatagagaccctgtctcaaaaactaaggtggagctcaatcaaggaagacacccaacatcaatctctgcttctttttctctcttcctcccttccccctcccaccccctcctaccccccactgagcagtggtggtacacacctttaatcccagctcttgggaggcagaggcaggcagatttctgagttcgaggccagcctggtctacagagtgagttccaggacagccagggctacacagagaaaccctgtttcgaaaaacaaaacaaaacaaaaaaaaaacccaaaaaaccaaaaccaaaacaaaagtgaaagcagtaatggaagagttgagcaaaattggctgtttatggtggtgtatgccttaatcccagcaatgagaaagcagaggcaggcagatctatgtgggtttgaggccagtctgatctatatagtaatttccaggccagtcagtgctaaataatgagactctgtctcaacaaaaacaaaaagtaagcggggggggnnnnnnnnnnnnnnnnnnnnnnnnnnnnnnnnnnnnnnnnnnnnnnnnnnnnnnnnnnnnnnnnacccacaacgttctgactccagagaggtgacaccccaaatcactcaaggtcttgttgcaaactgcaagaggactttttatttcaagagcgctctcgggcctacagtcatacaccatgcaggggtagaggaccatggcaccctgagtagttgggtaagggggtatttaaaggaagaaaccacaactcaagggggtgggaagggcgtggttggaaaataccaaaaataccagttaagagtcacgaggaagtggaaagtcaagacagttttctaggagcctctaacaatagcacctttgcatagcgggttccagcaacagtcagggtgggtcagggtgactttctttgaatgaacacttcctgaacacaggaagagggtgggtgaaggaatgttgctatctgttttatgattagcatgccttggagtattgagtcacaaaggtcacattctcaagcatgggcctaaaggcctagaatttttgtttttacgttatactttttcaatatgactgtaggcttagattttctttttctttctttcttttctttttttctttttttttttttttttttttggtttttcaagacagggtttctctctgtatagccctggctgtcttggaactcactttgtagaccaggctggcctcgaactcagaaatccacctgcctctacctcccaagtgctgggattaaaggtgtgcaccaccatcatttaccctcccttctagcccctccatcagaggtagtggggaaagaaggtttataggaacgggttatggacctgtttaaaagtagttctttgtggtaattccactcttcattgtcaggacaccagcagtctagtccaatcaactgagttgccaaggaaaccagaaattttccactgcatatgacacaaaaaaagaaagaaaagaaaatttagcagatcttgttatatcaaatttaaatagattaagctcatgaagtataaacataaattggcagatttgattataaaatatgcattatttatgacacattagtgttttcttgtgacatgtctttttgagtttggtgtatcatgatgcctcgtgggatgaattaggaagtgtcttcctgacgcagatgatacaggtttcgagtttttgtgaccttttttgttccagttgggcttagccctgggtcccaaggtgcctgatactcaatcgtcaacaaaagtcagcttgagacagtggctctgagttcattgttccacgtcaatgaaactttctttaaactttttgattctttgtgagtttcacatcattcaccccagtcctgctcatctccctgtccccttatatccatcctttgcccttgcaccccccccccgaaataaaacacacaaacaacaaaaaaaccaaaccatagaaaacacctcatcatggaacctgtgctatttcacaatttcccacgggatattcctctgtccacaaatcttcattggaaatgttcattgaggcaatgagttattggcctagttcaagatctctggcttctgtgacactatgtgtgtgtgtgtatgtgtgtatatatatatatatatatgtatatatatatatatatatatatatcctccctgaaactcttcccagttatcctgttgttgcccagtgtcatggagagtctgcagttttggatcattaggaatggccctttcataaatgaaaacatatgcagatgatatagattttatggtggaccaattcagagccctggacttgggcctgggtgatagcagaactggtcagcccactgactctcctttatctaccaccagggtgagttccctagcactacctcagctaggccaccagtgccaccatcagcaggaggcagggtcagctctccagctctcatgctctcagggccggctcacccactttcgtgcctccagagccagctccactgtgctgtccagtcaaggtgcagggcccactctcccaagtgctgcagcttgtgagaggctggtttagctctttcactctcacaccctctgggctagctcacccctgctttcaccaacaggcccagctccactgtgttaagggcacagactctgacagcaaagcagcattcagaagcaaatcaaacgttcttaagaagctttacagagaaatacgatgaaggaaaatcaaggtgtgagagaaactcccaaggaagagtgagaaggatttctaagacaggaagaagccttcaaattacttaacattttttaattggaccatggcagaaactggacgaaggctgagcgagtctctgttaagattagagatgagggctggtgagatggctcagtggttaagagcaccaactgctcttccgaaggtcccaagttcaaatcccagcaaccacaaggtggctcacgaccacccgtaatgagatctgataccctcttctggggtatctgaggatagctacagtgtacttacatataaataaataaatcttaaaaaaaaaaaaaaagattagagatgaactctctggccatcatgggccgagccagtggagggcctacactaaggagctgttcagagagatgactttttgtttgtgtacccacacagttaggggtagtagaagccccactgctgactccagctttgactttgaagtcagctagctgcttgtcacttggcgggcattaccaccatctgaccttgcaggtgttaattacagtgagcctctttgttcccacagcctgtgtctttataggggcagagtttaactccatcccagtcatcaagatgcaactccctcatattcagctcctagtctgcaaggtggttggatgtagtctcctctatttacttgtaatttagttatgttagctgcatgcaaagtaagaagataagaacgggctgtagaatgttacacttgtcctctttggtgatgaacagcaatgtggaaatgtaaactgggtgtggggtgtgggggaggggctgctgctggcctagaatgctgctttccttctatctgtctagttcaattatctcatagccagctacaagtcctcctgttgatcttccttggtgctccaggctgtgctatgttagcccttagagagtgaccttagttctcaccacagtttatgtgaacgaactacacacacacacacacacacacacacacgtgatatatatatatatatatatatatgtatggatggtactgctcccaataggctgggctctcttacatcaattagcaatcaagaaaatgctccacagacatcaagccaatctgatagagacaattcctcagttgaggtttgagtcaagtcaagaaaagctaaccaggacagtgacagtttgaatacttgccaacctggatacctctcagttgttaggtctctgtttactgaatcagtctctgttacactgctccacagatttttctgtgtcttctgcactgagtgttgacagtttgtatttcaaggagtttgttcatctaggtgtcctactgtgttggtctttcatttgctcctatgggatctttcctttatataggagttaaagattgggccagttctctgcagtggaagtcaacagaaaggtgactggagaggaagtagagacaactgtcctgcagagcaggcaggcttagatggcaggcacaactgtgggaaggaagatcggaggcagaagcagccctagagtcagggctccaccctgtcaacctccttctggtttgccctccctgatgtcatcacatttaaaggaggttcactgaaatctattggggtgaattcccctagggagatgtgaataagtatctattcaccctagatagagcctgcattagactaaagaaagaattctactcaggtctagcttagtgaaccagtgagcttcttggagttacatacaggaatatggttgggggttccaaggctctgacactcttcatctgacctcctcaggtactgcacacatgaaagatgccttagtggttaagaatagtaggtgcttttgaagaggacctgggtttaattctgagcactcacatggcaactcacaaacgcctgtaactccagttccagggagatctgctgccctttcttggatgtcttgggcactgcactcatgtgcatatacatatgtgtaggcaaaacattcacacacccaaaagaataaaatcataataaaaaagtaaagttgggtagcagtgacacttttgcatgattttaaaagtcaacagagggctagagagatggctcagtgtttaagagccctgactgctcttccagaggcctgagttcaattcccagcaaccacatggtggctcacaaccatctgtaatgggatctgatgccaccctcttctggtgtgtctgaagagagtgacagtgtgcttacatacactaaataaatcaataaatatttttttaaaaatgtcaggtagtggtggcccatgcctttaatcccagcagttgggaggcagaggcaggcggatttctgagttccaggacagcctggtctacagagtgagttccaggacagccagggctacacagagaaaccctgtcttgaaaaaaaccaaaaaataaaataaaataaaagtcaacagaatctgagatttattttacacacatacacgagagacagagacatagagacatagagagacagagacagagagagagagaaacagaaagagagagagacagagagagtactctcgcatgcatacatctgtgtacacattggatcacatcatggtcaccatgtaggtgctagtattaaaactcaggacctctgaaaaaggaaaccaatgctcttaacctctgtcttagtcagggtttctcttgctgcaatgaaacaccatgaccaggaagcaagatggggaggaaagggtttattcagcttacacattcacattgctgttcatcaccaaaggaagtcaggattggaactcacagagggtaggaacctggaggcaggaggtgatgcagaggccatggagggtgctgctgcttgctggattgcttcccctggcttcctcagcatgccttcttatagaaacaaggattaatacaaggatccatgatttgctcaagaatgataccccagactcaaatagcatgcaaaggcaaagagcgtttattctgaaaaaattaccagcttgcagagatagtaagtttaaacatattaaatgccatattggagttaaacaatgtttttattctaaactttaccttgcaaacataaaacaggagagttaaataaaactttaactcataatttaccgcatcagtttttagcctgactatccacccctgttaagtttgagccttaaaagtcaattttgaattgaagctcttctagtattaaaataaaactttttaatccaaaaacattctccataaagagacttacataacagaacacaacagttttccatatggtttagtttaggctgaaaccagtctcagaacaggaaaaggttaaaaagttgggaagctgctacatccttggctgagcgacctcttatttgggttgctggagcattgccagggttaaggcaaactgaaaggagggggtggattttaagagttagtgatttctaaccttttaatgtaaccctctaaaaattttaattcctgatatcactgtaatatatctgatgtaatgaaaagaaaaagaaaaggactaaagcttcccttttgactgctaggacatcttgggttcctgaggtgcttctaggagctggtattgctgtttgagaaccgccaattcaacagtgaaaatctgttctttcacaaacttgactaaaacattaattacacagggtctacaaatcagggccagcctcagaaggaagagtgggctagtcaaagcagagacaaaggtggccaaccaaggggactggttaaagagggactcataccagctttgagaccgtgctctttgtaatttcctgtctttaatctttttctaagctgagccatatcttctttgactactttggagtgaccagcataagcacagcattcttctccaagagctgaacataaaccaccctgctgaagaaacaactccaatcctcttcaatggtttttaactgtttcagccagagaggaaagggaatcttgtagagcattaatagacttgtctatttctcttatattgctatctagtgcaatgtatatggttctgtaattcttttttttaaagatgtatttatttttatgagtacagtgttgctgtcttcatacacaccagaagaaagcatcagatctcattacagatggtcatgagccaccctatggttgctgggaattgaactcaggacctctggaagagcaaccagtgctcttacccatacagccatctctccagcccctaagttctataattcttatcatgtaatattagtgctgaagctcctgtgcaagctgctccagctactcttataccaagcagggtgaataatactacagcagatacatcaacccttttacccagtgagctggggagactaattgattgggactatcttcccctgtatagtaagttaatcagggaactagctgtaccaggacatagaaatcagatgaggtatttaaagtttgttgttgttgtttttataaagacaaggtttctctgtgtagcactggctgtcctggaactcactctgtagaccaggctagctgtgaactcagaaattcaccagcctctgcttcccaagtgctgggattaaaggcgtgcgccaccacgcccggctgaggtatttaaaattaaggtgtaaatacaagggataagtcctgatgcacaggcctaccaagcatctctggaggtatatattatctataatttatattggcaagagtcataatggaactgcagaggtgtgaatgttccgagggtgtcttgtcctgttactaacagtaaggtcagtttactgttatttgactactgccatctctactgattactctctgtggactgaacagtttccagggatagctgttccttcatagtagtgggactggacatttaagcataaccaacagtcctgtgtcaatacttgatgagaggagttaagtacttggaaagaagctcccaagagttccaacccctttcaggggttctgagccaggttgtgaaatgaggttttgttggagaaggaggttaatgaagttgcttcttggtgtagtggtaggaatgggaatagatgtggacaaaggccagggatctggccttgttaggactttattgggtccaatgggtacccctagaacttgtctaacaactagtctgacggtgaacagaattcctccataagagccacctactctctgatataatctcaatgcccaaacataacccatatcccatcctgtggcctgttttcctttttctgtgaagctgagtgtcagggcattgcaaggtagatatgggtgagaactgtgagcaatatgaaaagtctgagaaaagcatgggggtattccatttctaactagcttgatgaagtcagatttaatgagagttccctgttgacagagccagtgccttcacaaccccagtgtacacaataatagtgggaggctcctccacagcttctctggcaggcttgatgctctgggcacacagaaacatattgtcgccgggcgtggtggcgcacgcctttaatcccagcactcgggaggcagaggcaggcggatttctgagttcgaggccagcctggtctacaaagtgagttccaggacagccagggctacacagagaaaccctgtctcgaaaaaccaaaaaaaaaaaaaaaaaaaaaaaaaaaaaagaaacatattgtccttgaaggtattttttcctatagggactaacaggtgatgtatcaaatcttctagatcaaagtgtaagcctgagaaccaagatccaagggaagcagcaaggttgacctggtgtctcagttagggtttactgctgtgaacagacaccatgaccaaggcatgccttataaaggacatttacttgggactggcttacaggttcagtggttcagtccattatcaaagtaggagcagggcagcatctaggcaggcatgatatggcagagctgagagttctacatcttcatctgaagactgctagtggaagactgatttcctcgaacctaggatgagggtcttatagcccacacccacagtaacacaactccaacaaggtacactttctaatcatgccactctctgagctgggtatatacaaacaattatattccactccctggcccccaaacatatgagtctatgggggccatacctaaacatagcataataaaaaatacatttagttcaacttctaaagtctccatagtctatagcagtctcaacaatgttaaaagtccaaagttcaaagtctcttctgagattcatgtaatcacttaactgtaatccccaaagcaagacaggaaaccagcagggcaaactcagaactctgcatctctatgtctgatgtcaacacagtcttcagatctccaactcctttttcatctttgttgactgcaacaacttctttctcctgggctgcttccactccctgttagcagctttccttagcagatagcccatgactctggcatctcgaacatcttgggggtctccaaggcaacttcaatgttacagctttttgtttcaatgtctgggatccacacatgatctgggttcctccagagggctggcatcatttctcaagctctgccttctgtagcactctaagctcaggttgatccactccaccactgctgtggctgttcttggtgaccatcccatggtactggcatttccaatacactggagtcttctgctgcaacagatttatttattttattgtatttaagtacaccgtagccgtcttcagacacactagaagagggcatcagatctcgttacatggttgtgagccaccatgtggttgctgggatttgaactcaggatctttggaaaagcagtcagtgctattcactgctgagtcatctctccagcccccagcttcttcttctttgcttgtttgtttgtttttccaatgtctggcatccacaagtgatcttctgggctcttccgaagggcttaggttagttctccagttctgccctgtatagcactctaagctcacgttgatcaactccactgctgttgttgttcttggtgatcatcccatggtactggcatctcccatacactgtgttcttctcctgcaatggcttctcataggctctcttcatggtgccaagcctcaactttgcatgaccccttcgtcttgtgtcatc

SEQ ID NO: 646 - DNA, 3504 bp, Mus musculus
ggaagacgagcgctacattgtcgctggggacaggatgaaagggggcacaagcaaatttaagacccacactgaaactttgtacaagaaaaagaaatggtcttctgtgtctgaaaaaagacctcagaaatgtccctctcagtgcttggagagcaagcagcctcaggtatctgtgttggggaagaggaggagggcggaaccccagacaccagcccaggagaccttagagagtgagtggcctcaaaaggccaagaagaagaagagaaggggggaaccccagacaccaacccaagagagtttggagagtgagcagcctccagtgtccttgctggggaagagaaggagggaatcccagacaccagcccaggagaactcggagagtgagcagcctcggaaagccaagagaaggaggaagaaaaggaaagggtcccagcaaccaacttcctcccttctgaaaactccagaaacctttcttaaagctaagaaaaccacttctgcccacaagaagaaaaagaatagtgttctggaggtggatatggaaactgggatcatccttgtagataaagaaaacatggagaacctgctagagacttctagaaaggatgtggatattgtttatgttgatatgagcaagggacaaaggtcagcaaaagtgcgtgaaacaggagagctgcccgctgctaagccacaggaacatggctgtcgagagctgctcggtgacgtcaggagcagaaagaaacaaaagcacctccagaaagttgcaccctgggatgttgttcaggggagccagcctgagagtatctccctgcccccatcagagcccttgtcttctgaagatttagaaggcaaaagcacagaagcagcagtgttttgtaaaaagaagtctaaaaaaaacgtgttcaggagccaggaattggagcccatccccgacagtcttgatgactcggagaccatctctgagagacttgatagcacacaccatggaggagctgtcggggctggagaagaatgtgagagcaccaaagaatcccacagtatcaaaaaaaagtccaagaaaaagaagcacaagtctgttgctcttgccacatctagtgacagtgcctcagtgacagacagcaaggctaagaatgccctggtggactcctcagaaggcagtggtgctgtgagggaagaggacgtggaccacaggccagcagaggcagaagcccaggcttgttccactgagaagcacagggaagccatgcagaggttagaacctacccatgaagaagaaagcaattcggaatcagctagcaattctgcagcaagacacatatctgaggacaggagagagtctgatgactcggatgttgatttgggctctgcagtgagacagctgcgagagttcattcctgacatacaggaaagggcggccaccaccatcagacgcatgtatcgggatgacctagggcgcttcaaagaatttaaggcacaaggtgtggctattagatttggcaaattttctgctaaagaaaataaacaaatagaaaaaaatgtgcaagatttcctatccctgactggaattgagagtgcagacaagctgctgtacacagacagatacccagaggaaaagactctgatcaccaacctaaaacggaagcatgccttcagactgcacattgggaagggcatcgctcggccctggaagctcgtgtactaccgtgcaaagaagatctttgatgtgaataactacaaaggcaggtacaatgaagaagatactaagaagctgaaggcataccattccctccatggaaacgactggaaaaagattggggccatggtggcccgaagcagcctctcagtcgccctcaagttctctcagattggtggtactagaaaccaaggtgcttggagtaaggcagaaacccagaggctaatcaaggctgtggaggacgtgatcctaaagaagatgtctccccaggagttaagagaactggattctaaactccaggaagaccctgagggtcgcctgtcaattgtccgggaaaaactctacaagggcatatcttgggtggaggtggaagctagagtggagacccggaactggatgcagtgcaaaagtaagtggacagagattcttaccaaaaggatgacccatggtgggttcgtgtatcgtggggtcaatgctctacaggccaaaatcacccttattgaaaggttgtatgaactaaatgtgaatgatgctaatgaaatagactgggaagatcttgctagcgccataggggatgtccctccaccttttgttcaggcaaaattttataagctgaaagctgcctgcgttcccttttggcagaaaaagacttttccagaaatcattgactacttatataagaacagtctgcctttgctgaaggaaaagttagacaagaaaatgaagaaaaaagacggccagatccaaacacctgcagctcccaaacaagactttctgttcaaagacatcttccattgcgatgatgacagtgatgaagggagcccagaggagcccagcgcctctgatgtgcagtgactggatcgtctcttcctcaaactgctctctgttcccttggacctgtgttgtgcattggctatagatcccgctcgcatgtgatacctctcctgtgctgggcaccgagtcacacggtgttctgctggagcattggtagtctgcatcggagcccaactggtagccttgaagagtctgtcagctgaacacagccccactggattctcaggactgggtgaaaggggtgctctttggtcaatcaggagagtcaacccaactgtaggggcttcagagaagaaaacttagggtttgggtaagaagaagtattccatgagatctgtgcactatggagataggtgggggagtgggaagtggggtcacaggattgaagccaacctgggctacatagttcctccagcatatacacacacagtgggatgctggagcatcctccaaaaggagaagtgcattgcccagagagcaggagagtactgcagagaagctctagctctgcaagccccaatttccctgtgttccttctagctgttcccatactcaggctgtctgttgttgccctgcagagaaatgtgtccatgtgtgacccttagcagaacactgctgcaagggagtctgggacacccaaatgttcagacattcagacttctgccccatctgtgctggggagacagaagggaaagtgaggctaatgaaaccgcccatatactgctgtctacgttggtgccactcagcaatcttctgtctcccgagaactctcagacatgatttctgtggcactattagaaggtggactagagggctggtgagatggctcagtgggtaagagcacccgattgctctcccgaaggtccggagttcaaatcccagcaaccacatggtggctcacaaccatctgtaacaagatctgactccctcttctggtgcatctgaagacagctacagtgtacttagatataataaatcttaaa

SEQ ID NO: 647 - protein, 834 aa, Mus musculus
EDERYIVAGDRMKGGTSKFKTHTETLYKKKKWSSVSEKRPQKCPSQCLESKQPQVSVLGKRRRAEPQTPAQETLESEWPQKAKKKKRRGEPQTPTQESLESEQPPVSLLGKRRRESQTPAQENSESEQPRKAKRRRKKRKGSQQPTSSLLKTPETFLKAKKTTSAHKKKKNSVLEVDMGIILVDKENMENLLETSRKDVDIVYVDMSKGQRSAKVRETGELPAAKPQEHGCRELLGDVRSRKKQKHLQKVAPWDVVQGSQPESISLPPSEPLSSEDLEGKSTEAAVFCKKKSKKNVFRSQELEPIPDSLDDSETISLDSTHHGGAVGAGEECESTKESHSIKKKSKKKKHKSVATSSDSASVTDSKAKNALVDSSEGSGAVREEDVDHRPAEAEAQACSTEKHREAMQRLEPTHEEESNSESNSAARHEDRRESDDSDVDLGSAVRQLREFIPDIQERAATTIRRMYRDDLGRFKEFKAQGVAIRFGKFSAKENKQIEKNVQDFLSLTGIESADKLLYTDRYPEEKTLITNLKRKHAFRLHIGKGIARPWKLVYYRAKKIFDVNNYKGRYNEEDTKKLKAYHSLHGNDWKKIGAMVARSSLSVKFSQIGGTRNQGAWSKAETQRLIKAVEDVILKKMSPQELRELDSKLQEDPEGRLSIVREKLYKGISWVEVEARVETRNWMQCKSKWTEILTKRMTHGGFVYRGVNALQAKITLIERLYELNVNDANEIDWEDLASAIGDVPPPFVQAKFYKLKAACVPFWQKKTFPEIIDYLYKNSLPLLKEKLDKKMKKKDGQIQTPAAPKQDFLFKDIFHCDDDSDEGSPEEPSASDVQ

SEQ ID NO: 648 - DNA, 51289 bp, Homo sapiens
accctgtctctactaaaaatacaaaaattagccagatgtggtggtgtacgcctgtaattccagctactcgggtggctgaggcaggagaatcacttgaacccaggaggcgaaggctgctgtgagcaagactgcaccactgcactccagcctgggcaacagagtgagactccgtctcaaaaaaaaaaaaaaagcccggtgtggtggttcacgcctgtaatcccagcactttgggagcctgaggcaggcagatcacctgaggtcaggagttcgagaccagcctgaccaacacagagaaaccctgtctctactaaaaaacttacaaaattagctgggcgtggtggcacatgcctgtaatcccagctactagggaggctgaggcaggagaatcccttgaaccggggaggcggaggttgtggtaagccaagatcgtgccattgcactccagcctgggcaacaagagcaaaactttgtctcaaaaaaaaaaaaaaaaaaaaaaaaaaaatcagataagaagcactcaacagttatagcatatcaacagttatagcatatgccaaaaatcaaccagacactggatgagtgtgactgtgtgcctcccttgtttttgtccagccaacctgagattcttgaggcaggagtgagagcccagcagacgggtctaaggtttaacacagcccaggtctcagggaccaccgcaaagccctcagcacactgtcctactccaagggattcgctcagcccaaagtcctatgcctggttacaatgttcattgtctgtgacacattttacaagcattacacacacacaaacacagagaactaacaccccaaagctaggaaactccaagcatagctaacatgttggtggtctccattgttagcatttgatataaaatacatttaattatcttgatgtttttattaaactttaaatataaagatgcattttcttaaaaggctgtttgaatcagacacttcacgagacctccaatgctcctgaagaccacagaacagtttgcaaaccactgcaatagaaaacggggttttgaaatttcgtccgcaaggtcagttgtaaatgaggaaaactttgtctttcaaaataaggaacaagcaggcaggattatacagtgagcaacgcttgagcctggaatgctctggaaggtgtgagaagagacctctgattagttcaccccagcctcagaatttttcctggaggaacggccttcctgccacgccaccgcagtgttctgagagccacgtaataggaaagtgctgagttcaacaggaggaacctgagtgctgaggtctgcgcttaattaacgcttcaaagccaaagcacaccttcttcagagggacaaagaggacagcaggctcctccggcagggcagtggctgccccagggtggtgacgagccggtgaagggggcagctcggctttctgaaatggccacggagctgggcgggggggttagtttcctgcctcagcccgactcactgaaggatgtacctgggcacccagaagtgggagactttggtttaaaaagaagaaaaaaggaaaaaagggccatgagggagagagttgcaaggatggatcaacccacggcactctctagaaaaatgaaactgacccactggccctccaagatggggccattaggatgggcagctcatttttaaatcccttcctaaggttttattttctcctattacattgtaattgaatgtaaaaggactggagcaatcaggggtatattctcttcaacaataaagctgcgtgtaacattttcagattgtactcaaatgtaataaaaatactgacccatgctgggatatttgtacaactgggcttttgtctgcctgccttctttgtgttggtccctctccgtgcctttatgttcgccagcatcaatatttattagagatgttaagctattagtgggcatggtgtggttgcctaattttgtagagcatccaatttgaacacactggctctaaataaacgcttcctcgtgatgataatgataatgatcccagcggcagcactgggtcttgtaaactaggactcaagttggggtgaaaacctacaagcatttaggagccgaggagggcggaatggagctgaatgactttcccaactctgctttttcacttttcaaggtctggttccaggtccctgagacctgcccagaactcccttcctgcaaatctgaactcttccgggcaatgcagctcacttgaaaacttacgggggtggggacccatcacaatgcctgtcttatttgtgcatacctgcgtgtgtgtgtgtgtgtgtgtgtgtgtgtgtgtgtgtgaataagagctaacatttcccaagagctttccttacagcaggtgctgtgctaagctgcctgcctcttcgcattcatctctatctgcacagttataaacgtgtgcatgtatcccatctccccagctaaatagtaaatggttaactcctgtgaaattcagcaacgctgaattctaaacttgtttctatgcccccaggaaagctcaggatggcactgggcacttgacaaaccttcaacaaatatttcttggccgtcaagaagtcctaagaaatcagtagagctcactttggaaggaacattgaatgaaatgatattgggatctgattcatctgtgaacactttttgactgcctgctatacatgatgtcaccaatctggattgtcattggttaattaatcatatgttgtggccaaaagaacgtggggctggaagccaggagaccttagtctcatcccaattctgccaccaggtgaggatagcacctcggatgagtctgttcccctcgctgggccttgatctcctcaaaaaaggaggtggactagatgtctgtaagatgtcttccagccccaaatgccgtgtctgctctatgactctattttaaaaatgcatgcacttcttattggttacataaaacctcacagaaaaacaaagtcaataataaattatgaaaaaatcgggtgctacgatcttttacactttctaagggtgctcgattccataaattccacccccgtacataggcagcctctccagggagacagaagatccaaggctgtcaggggagcaaaccaagcagtctctccctataattgtattgacaggttatcagctgagttccgatggcaggaaaggtgcaaccctgacaggttttgtgaaggagtcttgaaggctattgtagcaggattctatgtggagtcacagaattctggggaaatgagaaccaagcagggagaagcttggttctttctctatttaattttattctttccagagagtcacatttgaaggaaaacgggctaactgcacatcactgtctatactagagttgaaaccctttctaatggaaaatatttacatcttttgtggccatgtaaaacaccgacttgattcagtcactcctattaaataaccagttgacttggttttaaatgaggcaaatggttgttgagcatctgtagataaaatacctgcttggatgtctcagtttttcacttttcacttggttatggtggcaacttgcagacgtgttcttgaataactgatgtgtatacatcctggtaaattttatggatgtgaaataacactgttgagtttgttcagtcagtatttctacattttaaatgaaaaaaaatgctgatcctattcattggagaaaacaacccacgaaacaaccccccaatatggtagaataaatgcctatttctaaggtgctatagtcttccaatgcacaccttcaggttcagacttagacaaaaccaaaatatactttagttctaatcaccctcctaaagacaccacggcagagtgcactcccaacctctaccatacatagcggaaaggcacacactactacggggagctgaaaatctatgatggtgaaactgacatgccacaatgaagaaatccacaagccaagctcagtagaaatttccataacatgaaaagaaaaaaatcttaaagctccacaacctcacatattttccattttctctttttctttagtcaaaaacaccaaagttgtttcataatttttttaaaaaaactaatataggaagctgtttgaagtggtaaaaataatgctgggctgggagttagcaaacgaagctgcaaacccaatctctgccaaaaccttgagcaaaacaaacaaacaaacaaacaaaaaaaagcacaaaacaaacaaacaaaaaaacccaaaaaaaaacaacagaggtggcttcagtgtgctcatttgcaaaaagggtccagaaaagataacagtcaaggttcccttttgcggtcaatttctctgccaacttttatttatgtcaggttttgacctctaaagttataagatattctaatattatatatggtaaatactgaaaagtggacgtcatcttaactgctccagaaagtaccttaaagaccccgaagaacccacgaaggaaagccagaggtaaaggctgccccctggctgtccttggtggaagaagagaaccccaggctccatcatcagagagcacgagcctggacgtgggtccctgctgctccagcatggtcaccaggggccagggcagacctgctctgcatctcgtgccctgaagacagaaccccagtcgtgggtgagtcacctcctgtacattttccgaccctaagcttgggttcagaaatcagggattgaattggtcctagaagctgtttagctagtgccatccagaggccaaatgttgtcctcgatatagctgggtggggcgggggaagcaaaaggaaaaaggaaaagaagggggaaatttacatatatgtacatacattttacacatatgtacatgtatattatacatatgcatacatgtatatatgatagatgtaaacggtatgttatatgggtgcatacacaaatgcatatgcatgtatgtgtgtgtgtgtgtgtgtgtgtgtgtgtgtacatattgctcagcgtgggcaccacacactaactcaccatggagaataactccatacgccctcactttacacttcagtaggaagaagttggctcactactaactacttgaacaaaagcaacgacctaaccttaatgcaggtagtcagaggtggcggacgtgattctctccttcatccaagaataatgggccccacctgcctgtcctgcctgtccactcagagtggctcttctcacgtagaagtaagtgaaggaccttgttccactttgagaggcctaagaaaggagcctattcgatggaaaggcacgagtgtgggaagccagcctcccccaggtgcagcctgcgcctaggcagtatccttcctcctctcaggaccgagtttagggaaggcaagaggagggagtcaatgttttgccaggagccaattaactcagttaattctagcacgggttcccttttccccaaaacaaaaacaaaccgccaccaccacctctgggctctactcagcgcctggcggtcacacaaataattgttgttgaatccacggttaccacctgcgccttccactcccgcacctgggacgcggggcgcatttttaaaggcgcactgccctccagcggcgcaagataaattcgcctcgaggcttgctccctgacccccaagcctcagcctgacttctccagtggcccccgggaaggtgtggccgccacagcagtgttggtttcccatcagcgggaagcgaggctaaaggtggggaggagggaagtgtaatggaagggaaagtgatccagcccgaaaccgcagctccctcattcttgtctgcggagcctcctaggccaaagattatgctttttttctcttagggttgtaatttgggtaagaaattagtatgatcgaacggaaatgaacattcgacgtgatgcttccaggacagacacggagccaccgctgcatagacgtaccccaggcgtgcagcggaaccggagaggcggcctttaccctgggagggctggcagccacgacttagactgggcgtgtgcgacctatctgtcaccctgtgggttcactctgtgggaaaccacagcagcacccattgcagccttaccccatgtcaggcgttgtcccgaggtcccgcagaaattaccctattcaatcttcccaatcagtccctttagtggtgccattatcatcccactgtgaggatggggaaaccgaggctgagagaggcgacgcgacctgcatgggggtccaggcctgtctggaccagagctggagcttcccacgctgcgctcggaccccgggccgcggggccagggcgctgcgggtggggacccccggcggcgcaggtgcccggagccggcgacagcgaaagcgcggtgggcgtggggtgctcaccttgacgatgagagggttctgaaacatggagtcccgcacgacccccagccgctcgttctccatgccggaacggatgtccgccacggtcaggggccgccgcgggggcgggcagacctggctgaccgtgcggcgcacaggctgctgctgcttcctccatcgcgtgaggtccgggccggagctcctggcctctggcatccttgaggtcgccggggagccggcccgcgggctggtttgggcgcgcttccccacgtcgggcacagcctggagctccgaagggcctgccgggcggcccgggccgcaccaccgggatcctgagggggaaactcagatgccaggacccctccggagccaggcgcgccccgctcgcgccggcccctcatcgcaaagagccccggagccctgcaggagccccgcgggatcctcagggcgtctcctgggccccgcgttgcagactgggaaaggaaagaaaaccaagaccacccctggaggacgaatgcaacggcccgtctccttggcgacgggacgccaacagagcccggctcggcttgtacttttctttcaagaaactcttggtggctaccagtgtggacttgtttggagttttcctgaatcgatacaggagaaccgagaatctccagtgggttgcgttcaaagcggcgtggctcatagagggtcatttacatttgtcttccaagtcgaagactccatcctctgctcacccccattccactcacaacccctccccacctctgctctttgcgccacacacacacctgagacagagcactaaatgcattccaagcctgatgctgatgctgacccactgggaggactcgggcaagttaccctcttggatcctaagggctttttttctttttttcctgtgagatgggtgacaaggaaacgctagagttggattacatcaatggttcccaaatttaagcaacagaatgaagggaaattgaaaaatacagatttgggctgggcttggctgctcacccatgtaatcccattgctttgggaagcctaggagggaggatggcctgagcccaggagtttgagaccagcatgggcaacatggtgaggtctcatctctaccaaaaattaaaaaaattacccaggtgtgctggcacacacctgtggtcccagctatgggggaggctgaggcaggaggatcacttgaggaggttgagactacaatgagccgtgtttcggcaactacattccagtctggatgacagaatgagaccatgtgccaaaaaaagaaaaacgaagattcacaggactcaccccagactcactaaatcagaatatctggaaatggcatctgaggctctcctttttttttttttttttaagagacggagtcttgctctgataatgacatgagccacctcaccaggccagatgctgcatttttaaaaatccccttacccacccacccacaacttggtgaaaaagttcaaacctacagaaaagttgaaagtcgaaagaagaatacaatgaaaatacatataggcttcacctagattcggttagattttgaagggaaggggagggttaaagaaagagtggcggctctacagcaaattcaggctttatgtccagcatgagacctacagaggtgggagaccagcttaatgccagtgcctaccgctgcttacaggctggagaaattataggcctgggcggggaggggcccggtgggtatggcctgctgcccgggaagatgttgataaggtattcccatgatgaggcagtttggcccttgttctggtggaacgtgatgttcctgtcactttctcccagcagaatatgataagaggcaggctgtttctcactgcctgaacccccgtggaatgtttcactttaagcaaggtctgcaaaatggcagggggcttacaaaatggtgcagtttggactaacagattcacccgtccccagcactggtcacattttcttgctctctctctgtgagcatgcacatacacacattacagaatcacctgaaaaatatctgtcaacaccatatttaaccctaagtacgtcatcatgtagcaaggacattcccatgtgtaactacaatgtcattatcatgtccgaagattttaatgtgatacaatagtgtttaatataaaatccattgcaaagttgagactctgcatttgaaaaaaaaaaaaaaaagcttcccaggtgattggtgcagttggaggaggattggaaaccactattggagttttcctgaatcgatactggatgatatctaatctctcctctagtgccagccttttgtgggttcattcatgcatcactagcaccacaaggctctgggtaagtggggtcaccacagaacacgtgacaccaatgacggacctggacttcaaggccttccatatcaacagtggacaacaccacatttacagacttctccagacggagctccaactgcacgtccacatcccagagcagcccttgcatggcaacatgagtacatacataggctcatcgtttctccaacctgcttcccttccagactttcacggaagcatagtttgtgcattttttaatcaaagccacttggcagatcacatagaagtcaggtggaacagtgaggggcaagatagtggagtagtagaaagagcataggtctgatttctggctggcccatttaagtcaccttggacaagttactgtaaacccaggtttctcatccacaaggtggggctaataatacctcattacaaggattaagtgagaaaacttgttgcctatatcgtatatgttcactatccaaaaaggttaaacgtttggttggtaaatataatggcctcgaattgatggccaggttaaagctgcccttttggctgtctcttcaggactctgttgaaatgggaagactgggatagatctccaaaggtcctgctaactctaaacttctgagacttcatccaagcttaacatccatcagcctctgcaccagatagcccctgcagacctctgacttcctctcccaccccctcccctgcattcacatgcattcacttaggctgggcgtgtgcgacctgtctgtcaccctgtgggttcactgtgtggattcactctgtgctccagctgctctggccttgtcccaggtcctccagcaaccaagttcaggacttttgcactcacttccagcctggaacactcttctgcctagattttttgcctgccctttccatttagaactcagttcaaatgtcactcctcagtgagccctctcttacatctaaagtagcacccaccgtcccctagtcactctccatcacgtcaccctgttttattttccttacaagataatctgaaattatcttagttgatttgtcatctgtcttcccaagttgttcctggagttcaccaaaaactggaataaatggaatgcacgcatgcattagtacgtcaatggagggggattctgtcctactttcttcgtttcaggagcactctctaccccacctgacgtctaaaggacccagaagggaaatgggtaggcaaatgtgcgcgcctccaaggcctagcggcagccgtgttaccatggcagcgtgacgccgagggggccggaaggcgacgcactactacttccgcttcctcaacagcagcacttccgggttgggagaaaggtggcggtgctttcggagggtaagttgaaagcgcctttgttgtttctgtttttcaaaatgcgcgcgtaaaaactcagcgtggggtggtgggtttccccgtcttctgggagacccgccttttggcctgaggtctccaggcctcggtctttgccccaggccttatctcggggaaactgaggcttgggtgtttttttttttttttttaaagatggagttttgctcttgtcgcccaggctggagtgcggtggcgcgatctcggctcactgcaacctccgcttcctgggttcaagcgattctcctgcctcagcctcccgagtagctgggattataggcgcccgccaccaagcctagctaatttttgtatttttagtagagacagggtttcaccatgttggccaggctggtctcgaactcctgacttcaggtgatccacccgcctcggcctctcaaagtgctgggatgacaagcgtgagccaccgcgcccggccgcggcttgggtctttgggagtgagaagatgcagaattcacatctggttagttcctccagtctcagccctggagcgcccacccgggagcagagcggggtctctctcgcaccccaaaggcggtgagagaatccgggaccaggtttgggcacgtacctgcagagcgggaagtgtatgttctgagtaaggggggataaatgcatatccgttctcaatatgtatcgagcactgactggggagccatttgggagcaagatggccaggattccagccctcaagaagccgatcatattataactgccaaaagtgcaatggggagcagctggttgttgggaaacactgttaaccagaaagatgagaccggctaaggagttagagaggtcctcttgagaaagtggctttcatacttggaccagttaaagggcagaaaggtaatgcggaggaagagctttcctgatggaatgggctgtttttgcaaagttcctgagacgaaaaggaaggtagtgtattctaggaactgaaaacagcagggtttctgaaacctagagagaagtgagaggtagagaggtgggcatggacttacctctgtccatctctaggctagattatgaagaaatgaagactcttgcaggtctgtgaggattttgactttatcttaagaataacaggggaaccctaaaaagtttttagcagggagagactatatatttagaaggttgtactgggctccagagaccagagagcagcctaggaagtatttacaaaaaagaaggaaaggaactgatggaaggggaaatgttatttaaagaaatcaaggccgggcgctgtggcttacgcctgtaatcccagcgctttgagaggccgaggcaggtgggtcacctgaggtcaggagttcaagaccagcctggccaacatggcgaaaccccgtctctactaaaaatacaaagattagccaggcttggtggcttgcgcctgtaatcccagctactactccggaggctgaggcaggagaatcgcttgaacccgggaggcggaggttgcagtgagccgagatcgtgccactgcactccagcctgggtgacagaacgagattctgtctccaaaaaaagaaaaagaaaaaaagaaaagaaaagaaatcagccagtgggtggctcacgcctgtaatcccagcactttgggaggccgaggcggttggatcacaaggtcaggagatcgagaccatcctggctaacacggtgaaactccgtctctactaaaaaatacaaaaaaattagcctggcgtcgtggcgggcacctgtagtcccagctactcgggaggctgaggcaggagaatggcgtgaacccgggaggcagagcttgcagtgagctgagatcacgccactgcactccagcctgggcgacagagcaagactccgtctcaaaaaaaaaagaaaaaaaagaaataatcggctttgctctgtttgtgatttattaagaggtcctaaaagatgggcctgaaaagtgtctgttgaaatttgtggctttaagaacaaaggcactcttgctggaacggtctcagtggagtagtggggtgggagctaccaggatgtgggttaataagtggatgaaaggtgaggtaatggaaagagtgatttctctttcaggaaatgttgctgtgaaggggaagaaagagaacagctggatgagactttagggttaaacgacagttgcattttttttttaagttagaggagattaaatattgttggcattttgctagaaaacgcaggctgaagatacaggagagagatgagagagaagatacggagagaccaccatctctctgagaaggcaggagagggttgggagccagcacacattttccttcctataacggaaggaaatagcctttgacagaagggacacttcctttgttgcagcgagagagagagagagaggatgtggcagtgcaagtaggtgtgttagacttgggggagtaacatattccttgtctaatacagctgatatttactaccccggataaattaggtagcttctgtagaaaatgtgcttagcattgagactttaaagaccgctgatatagagagagctccaggatctatgttgttaggtgaaaatagcaaatgcagatcacaatatatagatgttaaccttctgtgtaaaaaaggagaggaaatatgaagatcatttttatttttgtacgacgtaaatgtgttatttagccaaagataaatctaaaaaaatgaaacccagaagcaatacagagcaaagagaacaataagacatgtttgcaaaattatatttttaatcatctcttttggaaagtgcatttatatttctgtattttaattccaagtgcacacaccctgtatgtgagtattaacgttagtggcttgtgaaatttattccagtgtatcgcagaacgtccgctctttgttggacactaacaaggcatatccaacttctttcacaaagaggccaacttctggtttgaggtcagtggatacctgatatccccactgcgaagcccttttgtggatcctgcactcgaatggagtctaatggcttctccatggtacaaacacagaggggaacaagacagataaaccatctttttcttccttgttttcttttttctttgtcttttttttttaaagcagagaagacagcctgtaaatgactaaataaatgtttcttttttaaatatgaaagtatattacttgggaatcaggccaagcccaaggaatcagggaaaactttttgaagaactgatcttcaaaccaagctctgaaggatggcaggaggcaaggagggtggggaggctgtggagagaatttcatggagagctgggggggaaaggttatggcacgtttgaggaagcaaaacaagctgcttttggcttaaacgcagagttggaaagacgagttcagaggtgaggctgtgggggacaggggccttatggtgcaaggcactgttgttctctgttaactctttttttctctatcataaaggcagtgggaccagacagagagaattccagtgagccacctgtgtatctagaataatctgaaatttgtaatcatgactacaggcttgtcatttgtcatacaatttcattttgctgtgattttttccgctgaggctatgtttaaaatgcaaaaataggccaggcacggtggctgacgcctgtaatcccagcactttgggaggctggagtgggcggatcacgaggtcaggagatcgagaccatcctggctaacacagtgaaaccccatctctactgaaaatacaaaaacaaaattagctgggcgtgctggtgggtgcctgtagtcccagctattcgggaggctgaggcgggaaaatggcatgagcccaggaggcggagcttgcagtgagccgagatcgcgccactgcactccagcctgggcgacagagtgagactccgtctcaaaaaaaaagcaaaaataaaccattgttgtcacatttccatataggaataaaatggaaggagaatcaagcagatttgaaatccacactccagtttctgacaagaaaaagaaaaagtgttctatacataaggaaagacctcagaaacattcccacgaaattttcagagactcctccctggtgaatgaacagtctcaaataactaggaggaaaaagaggaaaaaagatttccagcatctcatttcttctcctttgaaaaaatccagaatctgtgatgagactgcaaatgccacttccacactcaaaaagagaaaaaagagaagatatagtgctttggaggtggacgaggaagcaggtgttacagttgtccttgtggataaagaaaatattaacaacacaccaaagcattttagaaaggatgttgatgttgtttgtgttgatatgagcatagaacagaagttaccaagaaagcctaaaacagacaaatttcaggtacttgctaagtcacatgcacataaatcagaagccctgcacagtaaagttagggagaaaaagaataaaaagcatcagaggaaagctgcatcctgggagagccagcgggcaagggacaccctgcctcagtcagaatcccaccaggaggagtcctggctttctgtgggtccagggggtgaaattacagaactaccagcatctgctcataaaaacaagtctaagaaaaaaaagaaaaagtccagtaaccgggaatatgagacactggccatgcctgaaggatcgcaagcaggcagagaggccgggactgatatgcaggaatcccagcctactgtgggcttggatgatgaaactccacaactactaggacctactcacaaaaaaaagtctaagaaaaaaaagaagaaaaagtccaatcaccaggaatttgaggcattggccatgcctgaaggatcacaagtgggcagtgaggttggggctgatatgcaggaatcccggcctgctgtgggcctgcatggtgaaactgcaggaataccagcacctgcttataaaaacaagtctaagaaaaaaaagaaaaagtccaatcaccaggaatttgaggcagtggccatgcctgagagcctcgagagtgcataccctgaaggatcacaggtgggcagtgaggttgggactgtggaaggcagtacagctcttaaagggttcaaggaatccaacagtacaaagaagaagtctaagaaaaggaagcttacgtctgtcaaaagggcacgagtgtctggtgatgatttttcagtgcccagtaagaactctgagagcacactctttgattcagtagaaggtgatggcgccatgatggaagaaggtgtgaaatctaggccccgacaaaagaaaacccaggcctgtttggcaagcaagcacgtgcaagaggcgccaaggtaacgagggagtggtattccagctgctggtatatttctttcgtatggattctgccgatacctctttatttagcacagacttttttttatttttaattttatttttatttatttatttatttatttttgagatggagatttgctcttattgtccaggctggagtgcaatggtgcaatctcggcttaccgcaccctccacttcccgggttcaagcgattccccagcctcagcctcctgagtagctgagattaccggcatgcaccatgcctggctaattttgtatttttagtagagacgacgtttgtccttgttagtcaggctggtctcgaactcctgacctcaggtgatccgcctgcctcagcctcccaaagtgctgggattacaggcgtgaaccaccgtgcctacccttagcacatacatattaaatggcaaaaatcatcaagaggtagaccctcattgtacagaatatcgtacatctttaattgtgtaaacttggcaggtagtttaatttcttcatgtgtgaaataagacagattcgattttcactaagaactattccagccctagaaaatctatgagtaaatttaaaagcccaaattacctttgaaaaatataaaagcccaaattacctttgaaaaatagtctgagcaaataaccagtggaaatggggcttagggctgcacttttagcttctaggctccctctgagatatatccaagtaattcaagttccagtaaaaagtttgaaaatcacagactgagtcaactccaagatctcatcttgctttaatattctagtagcctaagtgagagccattttaagaaaagtttaaggccaggcgtggtggctcatgcctgtaatcccagcactttgggaggccaaggtgggtgagtcacttgaggccaggagttcgagaccagcctagccaacatggcgaaaccctgtctctactaaaaatacaaaagttagctgggcgtggtggcgcgtacctgtagtcccagctactctggaggctgaggcaggagaatcgcttgaaccgggaggcagaagttgcagtgagctgagatcgcaccattgcactccagcctggcgacagagcaagcctctgtctcacgaaaaaaaagaaggaaaaattttaaagttatgaggtcaagtgatgtgttaatgttagtcaacccaattttctaaccccttaggttagaacctgcaaatgaagaacacaatgtggaaacagctgaagattccgaaataagatacttatctgcagattcaggagatgccgatgattcagatgcggatttgggttctgccgtgaaacagcttcaggagttcattcctaacatcaaggacagggccaccagcacaatcaagcggatgtaccgggacgacttggaacggtttaaggaatttaaagcacaaggtgagcttgtggggccttagtgtttgttgaacttcctgtatgcagagctagcacctaactttcttttatggatgattcagatttatagatcgacaagaagcattctttctcctccttcacctctatctcctaccagaattgtccaagctgtaaaattagcaaaataaagtgcacttgcttttcctcttcttgcccagtttctggtaaaggtggccaggaagaatggggctaaagagaccagataattaattcccactaagaagagaagggacgagaggttaattggttgagacactggaaatgatacaacagttatataaaattaaaatgctgtcaaattaaaatcaactttaatgaggtatcgtttctttctccaagatattaaattgatggtgagccagttgtggtagacttgatcaccttcttgatttcactgtgtttctgaacctctcttattaagaattattattattaagaataataaataacctttattattcttaaatccaataataaagcttagtgggtttaagaataaactgcaaatttaaggctgtatactacaaatgagcaatatttactgagtatctgttgtgtgagacccaatacaactggtcattgaaaaaagtaaaaagaggagtcataaccttccagaattaatgggattgaagagattcagaaaaatagacaagacaaattaagcaaaaaagacagcactacccacgtacacacaattatagagtggtatagaatcccattttggtgtattgtgttgaaatttttatgagtatgtatttcataaaagacttttttttttttcttttttttttttttttgagacagagtcttgctctgtagcccaggctggagtgcagtggcatgatctcggctcactgcaacctacgcctcctgggttcaagtggttctcccacctcagcctcccaagtagctgggactacaggcgcctgccaccaagcccagctaatttttgtatttttagttgagatggggtttcaccatattattgaccaggctggtctcaaactcctgacctcatgattcgcctgtctcggcctcccaaagtgctgggataacatgcataagccactgtgccttgcccataagatatttttaaagtaaacctaggccaagtgaggtggctcacacctgtaatcccagcactttgggaggccaaggcaagagaattgcttgaggcctggagtttaagaccagtctgggcaaaacagcaagaccccgtcttacaaaaaataaaaaattagccaggtgtcacacacacctgtagtcccagctactcgggaggctgaggcaggagaatcacttgagcccaggagttcaaggttgcagtggactttgatcatgccactgcactccagcctgggtgaaaaagcaagaccctatctctaaagaatgcataaataaatttgaaaactattttttaaaaagatagattaaacaggaaaggtcactttggaataggatgacccgggaagacattgacagaagaggtgtggcttgggctgaaccctgaaggaaaggccaaatctgcaagtgcgggcaggagggcgaatgtcaggtgttgggactgttgggccgaggtactgtcattgctgatgaaaaaccaagtcataggtttgcttttgttcattattaacaatacacactttctccctgttccttcccaattctaggtgtcgctattaaatttggcaagttttctgtaaaggaaaataagcagttagagaaaaatgtggaagactttctagccctgacaggcattgagagtgcagacaagctcctgtacacggacagatatcctgaggaaaaatctgtgatcaccaacttaaaaaggagatactcgtttagattacacattggtaagtttagaaacaatcactctttgaccatccacagccttccagccataaacaagataacccatggtaagtgttagcacggtacctggcccattgcctgcaggcggcgcacattaactgctgtgatggctgatgatattcttttttttttttttgagacggagtcttgttctgttgcccaggctggagtgcagtggtgcaatcttggctcactgcaacctccacctctggggttcaagcgattttcctgcctcagcctcctgagtagctgggactacaggtgcccaccaccacgcccagctaattttttgtatttttagtagagacggggtttcaccttgttagccaggatggtctcgaactcctgacctcgtgatccgcctgcctcggcctcccaaagtgctgggattacaggcgtgagccaccgcgcccagccctgatggtattcttattgccagtctgtactttctgggatttggaatgtgttcatgtctcccaagtttagggtgaaaaattaaatgatcaacttttacctttcttccttggcaatagttgtggttttggtttctcctcctgttccttatttatattttgtgtacgctacacaaagcacatccttatacgcaccatggtctcccgtgttttttaagtgtggccatatgtgtgctttgtaactggaaccctccgactggaggtgctgcctgtgaagttagaaggtcatgctgtcatatgggatcagagcgaaagcaaatctctcttgaatttaaagaggataatttcttaggtgttgtgtggaatccacgaagaaaagcaggctagtacgcccccgttgagggattatttccccttagagtgagaaagtgagaaaagctgatttgggaaagattattgttcatcttctggaaaactgttaccctgtattctccaccgcagtgttctcttcctcttaattcacattatcttaaaactactttgcctcttaaggattctttccacaaattgcatagaccggaagctgaagcctcagggtactaagcatttagttttcggagatctccaaggaaactggtgattgtgtgtatctgctcttcaagacagctttcttaggccgggcgcggtggctcatgcctgtaatcccagcactctgggaggccgaggagggcggatcacctgaggtcaggagttcaagaccagcctggccaccaaatgaacctggccagctggttcatttggtgaagcagccttcaccaaatgaaacagcctggtttcatttagtgaaaccccgtccctactaaaaatataaaaaccagctgggcgtggcggtggacacctgtaatcccagctactcgggaggctgaggcaggagaattgcttgaacccaagagatggaggttgcagtgagccgacacagtgccactgcactccagcctcagtgacagagtgagactctctcaaaaaaaaaaaaacaaacaaaaaaaacaagacagctttcttcaggacgtaggaaatcccagccttaacacggggcttaggatagttcgtgttgttataagggctgttctgggttccttttacaattgcgacttcatttcatgtgagtccctctgatcacctttcttctgactttaggtaggaacattgcccggccctggaaacttatatactatcgagcaaagaagatgttcgatgtcaacaattacaaaggcaggtaagaaaaaagtcttagcagcttgagacaacatttctctagtctttgctgataccataaatcaaaatattcacagcagtggattagcagtaaagataacgcagatttgtgtgtgtgaaaccaggtggtgtatttgttgtcaaatgtgtgtcttcatggccttttccatccccacctctttagtgaagctgtggtgaccttctgtttcctgcatctgcagctttctctacactttttctttagcactccccatatgctgcttcatgtgctgtgactcctgtttactctgctctctgcttacgtcataagctccttgtgaacccaaacatcccatctcgacacatgttccattcagcacttagcagagtgctgtgggtttttagtaactatttgaaggtggaggtaagtgctgggattaggtcccttaaatgcagttcagtggtatcaacctggggtgcttaacccggttgtcattctctccttccttttccccaaatacaatatcggattataatttgtttccaacacatttaaaaacaaaccaaacgtagaccgagcgtttgggttagcacgttagcactctgctcagggacagaaggagaagcaggaaggtgttagctcggattccacggcccccgaaaactaccttctactcagctgcttgacctctctctgagaggcagctttcataaatcttctggcagcggcagttgagttctgcttagctctgtgattgtaaactgagacataggtcattacttaaacttccaacgttgatatgacctcggtttcctttttaaaatttttacagaaataaatcagccttaggtgaggaaagttcacacacagactgagacctgccctgcctgtttttccccaatcctgaggttagacaattgtgaacagaacttttaagaaaatccactaaaggtaacattttaaatgggacttacaagaatgcttttggcaggttaatggtggcagctgaggtaatatatttccacctgtgacacacacacaggaatgaaatttttagagtaatttttagagtcattctaaaaatctaacagttcatctctttgtgctgtattatttgtgttgtggtgatcatttacccttagaatatttttatagcaagcaattcctgacttcaaaaaaatagaaagtaaaaaatcaaagaattattattattttaatttttaatttttgttgttgattttttgttgtttttttctttttttgaaatggagtctcagtctgtcgcccaggctggagtgcaatggcgcaatcttggctcactgcaacctccgcctcccaggttcaagcaattctcctgtctcagcctcccgggtagctgggactacaggcacccaccaccacgcccggctaatttttgtatttttcgtagagacggggtttcaccatattggtcagactggtctggaactcctgacctcaggcgatccacctgcctcagcctcccacggtgctgggattacaggggtgagacaccgtgcctggcaattttttttttttttttggaacagggtctcactctgtcacccagactggagtgcagtggtgcgaactcggctcattggaacctccacctcctgggttcaagcgattctcctgcctcagcctcccaagaggctgggactgcaggcgtgtgccaccacacccagctaatttttatatttttagtggagatgagctttcaccatgttgaccaggctggtctcaaattcctgacctcaagtgatcctcctgcctcagcctcccaaagtgctgggattgcaggcttgagccaccacacctggcttacagccatgattcttaatagtgaaaaataggccaggcacagtggctcacacctataattcccagcactttgagaggctgaggtgggcggatcacttgaggtcaggagttcgagaccagactggccaacatggtgaaaccttatctctactaaaaatacaaaaattagcctggcgtggtggcaaacgcttataatcccagctacttgggaggctgaggcaggaagattgcttgaacctgtgaggcagaggttgctgtgaaccgagattgcgccactgcactccagcctgggaaacacagcaagactccgcctcaaaaaaaaaaatagtgaagaataaccagtttctattcaccatacgctgcatttacagacaaatgtctgaaaatgctccgatgttattgtttgtttttggctgggtgcggtggctcatgcctgtaatcccagcactttgggaggctgaggcaggcggatcactggattaggagtttgagaccagcctgggcaacgtggctctacaaaaaatacaaaaattagcctggtatgcacctgtagtcccagctacttgggaggctgaggtgggaggatcacttgatcccaggaggtggaggttgcagtgagccatgatcatgccactgtgctccagcctgggtgacagagccagaccctgtctcaaagaaaaaaaaaaaaagaaattgtattttttaggacttcttagtgatgacataaaccaccattcctactcagataggaatctgaagatgttataaagattgctttttatttatttaaatatttaggtgtttaatcttaaaatccatttataatattatagtgcttttcttagtactttaatatatgtgtttgctgagaccagctcggtccgggagaccctaacccagcggtgctagaggaattaaagacacacacacagaaatatagaggtgtgaagtgggaagtcaggggtctcacagccttcagagctaagagccccgaacagagatttacccacgtatttattaacagcaagccagtcattagcattgtttctatagatattaaattaactaaaagtatcccttatgggaaacgaagggatgggccgaattaaaggaataggttgggctagttaactgcagcaggagcatgtccttatggcacagatcgctcatgttattgtttgtggcttaagaatgcctttaagcggttttccgccctgggcgggcccggtgttccttgccctcattcccgtgaacccacaaccttccagcgtgagcattagggccatcatgaacatgttacagtgctgcagagattctgtttatggccagtttggggggggggggcttgctcccaacatgtatttttatgtaggatgaatgcactttacatttctcaagtagttacatatttacagtaaagccatttgttgcatgtttatgcagtttatacagtaaagccatcttttgtctgtcaagcattatggataacatagtatacgaaaccgacaagatctctgccctcatggaacttcccttctagagctgtgtcttccagtatggtgaccagcagcctcctgggcctgtggaacatttgaaatgtagttagtccacattgagatgtgctgtcagagtaaaacacatgctgggttttgaaggctcaagatgaagaaccgaatgtaaaatacatcgttgatattttttgatactgatgacgtgttgaaatgataggcatttttaatgtattgagttcaatgaaatatattattttttgtttttgtttttcatcacgcaacatgtccatgtaagaaatatattcttaaagttcctttgattaaaactaggtaaagtgagttttcctatgactactaggaaacttaaactccgtaagaggctcgtattatgtttctgttgggcagtgctggtctggaggaagaggcatgaacaagggagccagtgcacgtgtgagtgcaggttgtgaccagtgctatggaagagaagcacggtgttctccaggagcaatcaacggggacttcaggctaagggggtcagggaggcgctccccgaaaacacaccctttaaacggcactggcgagcatgcaggcactgtccaggtcgggtggaggaaggccgtttccaccacagggacagaggctctgagctgaagaagggctaagtgattgctccggctgctgttcagttgagccaggcctctggtctccacttcagtgattgattgataggatgaccaccagtgagacgccaacaggaagtgaagagggctgtgaccgggttccctgacagcctgccccattcagctttccccacgattgctgcgtactgggatgagaataccatttttaatctgatagttcgtttaaacttgtaaaacattttccctttctcctaggtatagcgaaggagatactgagaagttaaagatgtaccattctctccttgggaatgactggaagacgattggtgagatggtggcccgaagtagcctctccgtggccctcaagttctcacagatcagcagtcgtaagtggcagcccccagtgcccacctcgctgaagaaataagccctgacaggcctggttcagccataaccgatccaatgcccggaaatcaccgtagacctgtcttccgcaagagctttgtttcttaagctgttctctatactaatttgtttggtttcctcgtgtgtttagtgaagccatgtgacctttacccactaggctggtttttaccacacttcagtaactgtccgtgcaaatataactgccaagtggaccaggaccccaataaactggtggtgggagagcctgggcggagggtcacttccccgcagtggcacgggacacgttgggagggaggcaggcacgcagttcgtgcccgtcaggcggggacttttctcagaaccagtgttggtgacctcctgtctgtgtctcctctttcctaaaaggtttcctttcagaagacagtcctgaccgggttttctgtttagcacaggggctcacacactccggccacacagctagtgccttgcagccagttcttcaagtttccaagaactagaggaaaatcttaaattgtttttttttttaattttgtgaactctagctatctttttttcttttttggaaatctcttgatttttaaatattcatccaaattgttattgaggggaaaatgtaacattctgtgggccagaccaaaagcacagccaaacagctgccagtgtgacgctccttacttagcgtgaccgtgaatgtctctagtgaagaagggtgaaccgttgatactttggggcatccgccacagataactggcttcagaaattctcaggtgccttcatcaagtactgtgttggtatcagtgtagctatttatattgttacactatgaactcttggccaagagacatgtacataacataaaagccatttggctggcttttcttcccccattaaatgtttgggaacctcacagtttgatgcgggagacgttctcagaaacaggatgaacaactgttttgaaataaataaataaaacattgctttaagaaaggacttattgaataatttcaggctttagttcttaaaaagaatccatgactgtgttagtaatttcattttaatatgcacataattgtgtttgttttatgtctatataattgagatgcacattattttctgaaaagtacccgatttatcatttcatttttaatattgtgtttgaaagcaaatagactagctactataagaccatctttttatatctacagaaagaaatcgtggtgcttggagtaagtctgaaacccggaaactaatcaaggctgtcgaagaagtgattctgaagaagatgtctccccaggagttaaaagaggtggattccaaactccaagaaaatcctgaaagttgcctatcaattgttcgggaaaaactctacaagggcatatcttgggtagaagtagaagctaaagtgcaaaccagaaattggatgcagtgtaaaagtaagtggtaagttcttccctctctctttctctgtctctccagcttctgtggagaggtgaggttaccaagaatatctgtgtaactgccgtggggaagctgacgtgtcaagaacagtcgtgtctagtctgctgccccagctgcttccatatcactctctgatttaaatgagcacgtaactagccctgatgcattgaagagtgtatgcttttctcctaaagaacttgaacctttttaaaactgaatattgacttctgatttcttcactctttctaagtctttaataaaacaaggtagcaatctgttggcagcattagaaaaaaaggggccacgcgcagtggctcatgcgtgtaatcccaacactttgggaggctgaggcaggcagatcacttgagggcaggagttcaagaccagcctggccaatgtggcaaaaccctgtctctaccaaaaatacaaaaattagccaagtgtggtggctcacagccaccagtagtcccagctactcaggaggctgaggcaggagaatcgcttgaacccaggaagtggaggttgcagtgagctgagatcgccccattgcactccagcctgggcaacagagcgaggctctgtctcaaaaaaataaaaaatatagagagagaaaaaagatagaaaactaacatacagagagaaatcacaagtgtagtgatcagtagcagctccacccttctaatgtgctttctgcttctgcggttcctcagatgaagcgaggtaggcatgctcctggctgcgtcagtcacatagagactgtttcagtcctgcttctgccacacattctttgctggatatagcttttccaagacctggagagtcgcggagctggatgtccagctgcagcgaactcctcaaaccagtggttctgcatgctcatgacccccccaccttgcacatgaagggcactcagtggctcttgaataataaataggagtaaaatccagagtagacatattttgtgttaaaagcaaactcctagatcatactgcttatataccttacaactccaggggaataaactccaaagaacagggaatgttggaggaaccagagctctttttacctctatttttagctaaaagaaggaagagtgagggccgggcacggtggctcatacctgtaatcccagcactttgggaggctgaggcaggtggattacaaggtcaggagttcaagaccagactggccaacatagtgaaaccccacctctactaaaaatacaaaaaattagccggcgggatggcgggcatctgtaatcccagctactcgggaggctgaggcaggagaattgcttgaacccaagaggcggaggttacagtgagccgagatcacgccattgcactccagccccggcgacagtgccagactccgtctcaaaaaaaaaaaaaaaaaaggaagagtgagttataagcctcaagtggaggatgacataccaatgttaaaaggaggacatggtaatcattaagggtagtactggttcaagatcaacataattaagataacatgcaagatttagctattaatttgagataaaaataggaaacttaaactctgaacgtttatttaccttgtgtaacattgaagtgacctccactggtacatttcaaccctgtaaacgtggatggctctcattaagagcaacaatgttgttgatcagcgtgtgtatctccgttaccaagaatgtaaatataacagctaatgatctatcagattgtgacaaattttgctattcaagataagtacttttaaaatctttttaattgggtcactgcctttactagaaccttcagtcagcctgcagccactagcttcggcattagaggaatcatcaaatcatttctcactttactaaatttgtcttatttgatgttccaaggctggtaatggtaataagagcaatgcctgtctgtgcatagatagtcaaaatacattgaggtccaggtactgtggctcatgtctgtaatcccagcactttgggaggcctaggcaggtggatcacttgaggccaggagtttgagaccagcctggccaacatggtgaaaccctgtctctactgaaaatacaaaaattagccgggcgtggtggtgcgcacctgtaaggaatcccagctacttgggaggctgaggcaggagaatcgcttgaacccagaaggtggaggttgcagtgagctgagaccgtgacactgcactccagcctgggtgacaaagtgagaccccgtctcaaaaaaaaaaaagaaaagttagaagttggttctgaatgagagcaatttagataagaaaaatataggatattttaatgaaaactctacccttgaaagtaaactatgtttttcttccttttaatgtaggacagaaattctaaccaagaggatgactaatggtcggcgtatatactatggcatgaatgccctgcgggccaaggtcagccttattgaaaggtatgaaaaatagaaacggatgcctcttaactgtttctgtctctagccaaagagaagttgttaacccagcagagtctgcagtgagattgccaaggtccaaatccctgttccagcactttccgcatgtattgtgggcatatgacctacccttctaagtctcagtttactcatcttaactcatctactgaggatgacgataatcgtacctagctcttagtgctttcaggaggataaaagaaaataacgtgtgaaacatactgtatactccgtgtattttagtctttgaagcatttcatatggatataaattatttacgcccgttggaaaatgggggtaaatgactcaggcagagccctcctgtgctccagcatgagcttgttggtgtcacccttgcttgtctttggttttgtctttgagttccttgtccatgcagggtcccccctaaagtgttgaagggtgacgaggaaaagggagacatgggcccgttttgtgatgcgtgtgagactagtggacctggcccgtgtcgactgaggaacaggaaagagcagcagaagcctgtgggttctggccttgctgtccgccttcattccctctgcctcacacgtgagccctgcctaaggctcactgtgggtttcctgatcctctttcctaggggtggatcggggggtggttatgcccccgcccagtcttccctgctagagaggcagcatagattaccagatccaagaagggcatctcaagtcaagcaggcctgggttccagtgtcggccccacctattagtcatgcaatctggagcccatgactgtgtctcttggcaccatttccctgtctgtagattggggggggagggttactgtaaatgaatttgcgcactttaaggtcttaacttggctcggcgtggtgcctgacgcccataatcccaacactgggaggccaaggcaggaggagcccaggagtttgagaccagcctgagcaacatgtcaagactccatccctacaaaaaatctaaaaaattagccgggcatggtgccacgtgcttatggttccagcttcttgagaggctgaggtgggagagttgcctgagtccaggtggtcgaggctgcagtgagccacgatcacgccactgcagtccagccagggtgacagagcgagaccctgtatcaaaaaaaagaccttcacagtgtctgtcacatagtacagatgtcctcttactgtgtgtctatgttgaatgatgaggtggtgttttttactgtgagaaagcaacatggtttgttgagagacacaaagggctcagaaagaggaaagaggtcttttcagcccatctctgtagcccaccaactgactgacctggattaaccttgggctgggatgctgagctcactgtgcatgtgtaacgagggagctggaatgcggcgaaagcgcacataccttccagctctcagcactccacgcgtccatgaagatggctatcatgattatttttgcttgaaaatttaatttttattttttctcacaggttgtatgaaataaatgtggaagatactaatgaaatagactgggaagatcttgctagtgccatagggtaagaccatttgtttaatattaaactaattaaaatatagagatgacttaataaatacaataactccctatcatcttacagggctgataatgatgctgcatttggaattttgtataagtggtggttaaaattcagtgtatttgctaggaaaccaatttgttagtgcagaggaaactgtaattttaggagcagtgtatacgtaaaggctctgagctgctaggtagatcaggttttcatgacactaaatacatcactagttggatatgtttttcatttttcttccctttttttagtgtcacatagatcatcacgcctcaggtgttttgtgattacagattttagctagagcataatacctatggcccacccacctccctcctatttcagttttccagtggaaaaataatcgtgtaaggaagtattaccatacagtcgagttgaccttggcaggcattggaggtgatattataggtactttagtaacaatgaagtgaattttcccagtacataccttttatcaattccaattattgaaaaatcaaaggctcagaattactcttcacccaccaaatacgaggtgcctatatgccaggcatttttctaggctctggggatacagcattgaacaaaagacaagttccttgcctggtagagcatccattctgctgacacaaatgccaagttttgtatagtatagaattaacctaaaaactacattgatgataacgatatcaaactaataataattattgactaccttctgtataccaggcacaaaacgtagtgcctgagtaggaactcacatttagttctgggaagagactgtaaacaaataagctcatttcagatagcatggtaccaaaaagaaaacaaaaatagagtagaagggacgtcgggggcaatcagatagagtggttagggaagactatggaagcagaagcggtggcagggtagccatgcggggatgagactgaagatgttcggacagagagtagtgaatgcggacaccttgagccagcactggctgggcacattcaagggactggaaagggaccaggtggcccagaacagtgagtaaaatgacggcagcgatgggctgggtgcgtgtgcaggccagactcccacgcctcaggggacttcagacagttgacaactcagcacacgctccagacatccaggagttccagttacctttgtgtacccaatttggaactttgtaaacactagcaattctctggttttcagcccagctctcacttcaaaatcatctggggaacttttaaaaaataccagtgccacgtgaatgggattggtctggtgtggggtctggcttcgcatgaatgggattggtctggtgtggggtctggctgtcaggattgttcagagctccaggtgactcagatgtgttaccctgccgagaccccgtgctttagcgctggttaaatgacttggtcggttcccagttagaacgttttagttgtgtgtaacaattcaaatacagaactgaatatcatgccccacccataaggaaaaaggacttgactgttcagtttgattttgctgtttttctggaataggtaatagattacgtagtccagaattaaagaaacgtaggctgggcacggtggctcttgcctgtaatcccagcactttgggaggccaaggtgggcagatcacctgaggtcaggagttcaagaccagcctggccaacatggttcaactccgtctctacaaaaatacaaaaattagccaggcatgatggcaggtgcctgtagtcccagctactcaggaggctgaggcaggagaatcgcttgaacccaggaggcggaggttgcagtaagccgagatcatgccattgcactccagcctgggcaacagagcaagactccatctcaaaagaaaagaaagaaagaaagaaacctgaaaggaaacacagtgaaaagtgtccccttaccactcaccagccacgcgtagccctacaggaaaccagtatctattttccgtagatggtttatgcaaaatgtctgcaggatctgagtgatgttctgatggctaatgttggctatttatacctactctcttttgttactgcttgaataggagttaccagagattgtcttttcaaagcaccagctttgattgcgttgaccctatcttgtgattattctaatgtcagctctttatcacgccctcccttcagctctctttgagtttattttgctgctgttcttcaacttcttgagatgggttcttagctcattttccatttttctttctttgtaatatacatttaaggccatatgttttcttctaagtactgctttattagcaatgcccaattatttttttcagaaactttattaggaaaattttagacagatacaaaataaatgaagcttcatgtacccatcaccccagttcagcaactgtcaaaatccagccatccttattaaacatctacattcactccctccaattactgttatctgttttggtaaattttacatactttgcagccttagtaccattcaaaattcaaataattctagtaattccatttctagaaatacattctacaaaacaacttcacacatacatgaaatgacttgtatacagagtaactgactgcaaaaggcctgttaataggggactggctatatatgtattttacccatatagtgacattctttatagctacaaaaaatcatgagaaagcccctcggtggtggggcaaagaaagcgccaagatacagtcttgggtgaggaaacactgcgtggttgcagggtggcgtgccagcgccacagaacaggaaagctgcaatgtgtgtgtttattcgagacttccagtctctgtgctctggaccaaataaatcagaccagccctccctccagcccacctgccaccgaagacacccaagaaaggcaaatgaaatgtatgcaaagtctcttaaaggcttcaaaaagctaaacaagttgcaagagtaacagaaagaaccccgcatcccctttacccatagtcgcctcttctgaacattctgctacgttcactttatcatccctctctccctcctccaagggaatacggtttttcccataaccattcaagagttagtggcagataccacttcccaagcaaggatgttattttacataaccatagtacaatcgagaatcaggaagtttcacattgatatagtacaccctctaaaacatagtccacattcagatttcaccagttgtcccagtgatgtccttgatagcattttccccctttaataattgttccatttccttagtgtccttttttttttttttttgaagacaagagtcttactctgttgcccaggctggagttacaatggtgtgatctcagctcactgcaccctctgcctcccaggttcaagcaattcttgtgcctcagccacctaaatagctggaattagaggcatgcaccaccctgcctggctagttttttttttaattagttaatttttttttttttgagacggattttcactcttgttgcccaggctggagtgcaacagcgtgatctcggttccctgcaacctccaccttccgggttcaagcagttctcctgtctcagcctctgaatagctgggattacaggtacctgccaccatacctggctaatttttgtatttttaatagagacaaggtttcaccatgttggccaggctggtctcaaactccttacctcaagtgatccacccacctcagcctcccaaattgctgagattacaggcgtgagccaccacacctgacttttttttttttcttttttttgtatttttagtagagatggggttttgccatgttgcccaggctatgcttgaactcctggccttaatccctctcaaagtgctgggattacagacgtgagccaccatgcccggccttccttactgtcttttaatctatgaagatcgtccatctttgctgttgatggtagtgaaattttggaggaatacaggctaggtgttttgtagaatgtccgcagttggcacttgtctggtatttcctcttgaggagattcaggctgtgtccttcgggcaggagtacagcatattcctgatgtttgctatcactgcattacgtcacaaggtacataattctcgttttgacttttttttattatttagctaaggcagcatctgcctcttttccccactgtataaaaatactggttcttcctttggtggtaagaaatggctgtgggaagacattttaagactatataaagatcctgttcctctttaagcttctgtcagtttccttgtggttttcatttgcatttctcatgtgagaagtgagattgaacatggctcttgtgtttataagctgtctctctttcccttcactgtgagccttcactgcacatagctcttgcattttaatcagttcctgcgattggagggcccaccactctcgatatctcaacttactgcttgctacgcaagggagagctgggctgcagagcacaggccctctacgtgttgccgagcatcatggggctcggggatcagtgactttcagatgcagggatgttgagggattgtttggcctttggttttggaaggtagacagtggggtgaggctgctgcagcctggctgacttccagaagtgtggctactggtgtgaggtcgccattggtccattaggaaagattttgttttgtttctagtcaatattctgcggaaccattagggagggtttaaactggttctggtggttagttatttatggtttgggattataaccaaacaagaaaggacaatccgtctcttccttcttgaatgtggagaattggaaattcttagtccaggccctgccaggactcacagatacatgccgtggtcccaaagtcttttcttttctagctcatctgaggggcagggtgcccactcttcagcaccataggccccaagcagggagggtgccaggtgctttgaaggaggtgacgctgatgtgcaccccaccagctcccatcttgagaacgacttacattgacaaagccctttataatgtcaaaccactttttaaaaattcaacttttcggccgggcgtggtgattcacgcctgtaatcccagcactttgggaggccaaggcgggtggattgcttgaggtcaggagtttgagaccaacctgcccaacatggtgaaaccccatctctactaaaatacaaaaattagctgggcgtggtagcaggtacctgtaatcccagctactggggaggctgaggcagaattgcttgaacccaggaggaggaggttgcagtgagccgagattgcgtcactgcactccagcctgggccacagagccagactccatctcaaaaaaaaaaaaaattcagcttttccattaaatttgtgtatgctttgtgacatttcttcagatcacatgatttttaaaactaaaatgggtttttatggttttaaataaaattacatgtttaaaaactgattattaagctgcacgtggtgacacatgcctgttgtcccagctactctggaggctgaagtgggaggatcgcttgagcctgggagccagaagttgcagtgacccgagatcacgccactgcattccagcctgggtgacagagtgagaccctgtctcaagaaaataaattaaataaaaataaataaaagggccccacaaaatccaggtagggggtaactgatgaactgattacctatttcagatttacgaatctcaaaactctaagatagagattatggcatctagtcaaatactatttgaaatactacgtactctcaaagttttaataacaaaatggtaaaaattatattgaaggttcagtctcctcagattcttaaagactttgtgaattatataggcaggatttaaggatagcatctccacctaatgaggtgtaacacttgcttggttttaaaacgtccagatcagttcttgttgcttcctgaagcatgggcttgggtctgcagcatgttgggcgcacagcattatgggaagggaaaaggcacaggctgccgtagagctggggtttcagagtgagacagatttggcatagagtccagggactccacttaaagtctgtgggcagttgttccctatttgtctgagcctttgtttcctcatctgcattatggtttaataggctgtcaggaaggctaaaggagataatgggccaggtgcagtggctcatgcctgtagtcccagcactttgggaggccaaagcaggtgggtcacctgaagtcaggagttcaagaccagtctggccagcatggtgaagccctatctttactaaaaatacaaaaatacaaaaatttagctgggcgtggtggtgggcacctgtaatcccagctactcaggaggctgagccaggagaacaacctgaaccctggaggcagaagttgcagtgaactgagaatgtgcctctgcactccagcctgggtgacagagcgagactccatccaaaaaaaaaaaagaagataatgcgagaaagagacattgtctggtacctggcacatacgtcctcagctagtggttgctgtgatgaagaggtcggaagaatctgatcatcttttacctctacatacttagcagatcaaattcttcatgctaatcattttaacaactggattagttaattgttttttaatgttccccttttattaggaaaaagtgcccaaaaagtttagtggttttttactttaaaatacaatttaagaataatttctgacccacttattgtaaattgaaatgttttgtaaattgaaaacgtaccaaaacctcataagcatctgctctttttagctttgtgaaataaacatcagggaacatctgtctttgaattgtgaccaatatgtatgtgtcctgagtgtaatggttaagagggtaggatctggagtcacactacttgatgaagtcccagctctatccctgattagccatgtgagcttgggcaacttctctgtgcctcagtttcctcgtctctccagcacgagggagagagtggtaactccctccttgagttgtcgtgaggattatttattgctgcagttaaggtgcttagggcagggctgagcacaaggtaagcatcagcccgttagccggcattatactttgccttctatactttgccttctcgactagtgatacaagttatcttaatttaaatagaatccattctgtactactgattctttttcccctttacatttttttaaaccaaataaacaatagctttccatattccacaaaaattgtgtcatatttgtatcacacatgtatgatgatcttatgtttacgataaaaaaaactataaacctcacctgaataaatgtacttactacactgtattgaaatgatagatttttaaactaacttgctttttatcttttctttccttttctaaagtgatgttcctccatcttacgttcaaactaaattttctaggctgaaagctgtctatgttccattttggcagaaaaagacttttccaggttagtattcttaatatttatatggctaagaacatggcatttggtgccacatgctggtaatgaaagtcacctaggcaggtgactggacttagagcctcagcttcatcagctgcaaaatggtggaaacaggcagattataatccctatctgacaggacttccagaagtcctaaatgaagcatgaacgtgtagggtgtggtcatcccggtgcttgacacttagcgaccactctgtaaataactgagtcctgctggtgttgccatcacacacacacactcgtgcacacagcacatgcacacatgacatgcccgtgcaccacaccacatgcaagcactcacacacaccacatgcactcacaccacatgcactcacacacaccacatgcatgcactcacacacgtatgcactcacaccacatgcactcacaccaaccacatgcactcacaccacatgcactcacaccacatgcattcacacaccacatgcactcacaccacatgcattcacacaccacatgcactcacaccacatgcactcacacccaccacatgcactcacatcacatgcattcacacacaccacatgcactcacacacaccacatgcactcacaccacatgcattcacacaccacatgcactcacaccacatgcactcacaccacatgcatgcactcacacacaccacatgcattcacacgcaccacatgcactcacaccacatgaattcacacacacaccacatgcactcacacacaccacatgcactcaccacatgcattcacacaccacatgcactcacacacaccacatgcactcacaccacatgcatgcactcacacaccacatgcattcacacgcacatgcactcacaccacatgcattcacacacaccacatgcactcacacacaccacatgcactcacacacaccacatgcatgcactcacacacaccacatgcactcacaccacatgcactcacacacaccacatgcactcacacaccacatgcattcacacacacaccacatgcactcacaccacatgcattcacacgcaccacatgcactcacaccacatgcatgcactcacacacaccacatgcactcacaccacatgcattcacacgcaccacatgcactcacacacacatgcactcacaccacatgcactcacacacaccacatgcatgcactcacaccacatgcattcacacacaccacatgcattcacacacaccacatgcactcacaccacatgcacacacaccacatgcactcacacacaccacatgcattcacacgcaccacatgcactcacaccacatgcactcacacacacatgcactcacacacaccacatgcactcacaccacatgcattcacacaccacatgcactcacacacaccacatgcattcacacgcaccacatgcactcacaccacatgcattcacacacacaccacatgcactcacacacaccacatgcactcaccacatgcattcacacacacaccacatgcactcacactacatgcatgcactcacaccacatgcatgcactcacacacaccacatgcattcacacacaccacatgcactcacacacaccacatgcatgcactcacaccacatgcatgcactcacacacaccacatgcactcacaccacatgcactcacacacaccacatgcactcacacacaccacatgcactcacaccacatgcattcacacacacaccacatgcactcacaccacatgcattcacatgcaccacatgcactcacaccacacgcatgcactcacacacaccacatgcactcacaccacatgcactcacaccacatgcatgcactcacaccacatgcatgcactcacacaccacatgcatgcactcaccacatgcatgcactcacacacaccacatgcatgtacacacatacacagaagcatacacatattccagaaagaataaaagacacccagttccttctttgtagccatttgtgggtggtttagatatgtaagtcccaaactcagatcatcagagccatgtgaggaacttgttaaaaacacaaatttctggccagatgcagtggcttatgtgtgtaatcccaacactttgtaagacgaggagttcaagaccatcctgggcaacataagagagaccctcccacacacacacacctatctctacaaaaaatacaaaaagtgtccaggcatggtggtgcttgtctgtgttcccagctacttgggaggctgaggtgggagggggaggctgaggtgggaggattgcttgatcctgggagttccaggcttcagtgagtgtgatcgcaccactgcacttcagctggggtgacagagcgagaccctatctcaaaaaaaaaaaaaaaaaaggatacagatttctgggcctcatttcagacctacgtaccaattcctagtctctagaccgagtccagaacctggattttcactaacgagcttgcaggcctgtgctctctcatgcagtctgcacggcactggtatttctcctggacctgccatttgggtgatatcgtaccctgggctgtgatgaaatgcgtctttgcgttcagcagacatcactacccgagtttgaatccttatgaattccaaggcctcgggcaagtctcttaatgtctttatgccttggtttcctcaattgaaaaacaagttaaaaacagtgcctacctcgtaggatttttgcaaggattgaagaagtgaatgtgggtaaaccaattggaaccagaccttacacacagcaataacaagagcagttcatattcattaccagcctcctgtatgcctcgaccttgataagaggccttgtacagacagataactgcacaattaaatttcttttctgtagagatcatcgactacctttatgagacgactctacctttgctgaaggaaaagttagaaaaaatgatggagaaaaaaggcactaaaatccagactcctgcagcacccaagcaagttttcccatttcgagacatcttttattatgaagacgatagtgaaggagaggacatagaaaaagaaagcgaaggccaggcgccatgcatggctcacgcctgtaattccagtactttgggaggccaaggccggtggatcatctgaggtcaggagttcgagaccggcctgaccaacatggtgaagacctgtcactattaaaaatgcgaaaattagccgggtgtggtagtgcacacctgtaatttcaactacttgggaggctgaggcaggagaattgcttgaacccaggaggtggaggttgcagtgagccaagatcgcaccaccgcatgagagagagagattactatttcttgtccctttttctcagtttgattatatttatatacatatgtcagtaaatctgttttcagtattgatgtttaataaagaatgtacaatggccagagttctactctttcctctggagcattaaaatatattgccattcctattaaaacgtatttgaatgtgaaaagagaggaacatatgaattgatttaataaataattacaactaatggttttattaaatgacaaaagtttcacaaatccctctaattgtagcagagaatagggtcacattctatgaacatttcattacgtgagttcagctatatgggtactgagcgaaaatgagaaaggtaacaatttcgaaaaagcatgcccttctgctgtgtttccagttgtttagatgtctgctctccatgtatatatggatcacattcgtgttagatggaagttgtgaatccactgttctctcaaaccggtctctttcccttgtacctatcatagtgtacatagctcaacttcctgagtttgattctagtgttcaaagataggtatttttcatataagatgtcctgtcaaagcaagtcattgaacttacctggtatttaactgaaaacaaacaaaaatcagcaatctcttccattgcttgtagaaatactgacttaggccaggcacagtggctcacgtctaatcccagcactttgagaggccaaggcaggagtatcacttgagcccaggagttcgagaccagcctggcaacatagtgagaccttgtctctgtaaaaaggaaggaaggaagggaaggagggaggggtggagggagaggaggggaggggacactctgttatacttatcgaaaggtgctatccaggtgtggtagtgcagccgatagtctcagctactcaggaggctgaggtgggaggatcacttgagctcaggagtttgaggctgcagtgagctatgatggtaccatgtactccagcctgggcaacagagacagaccagactcctaaaaaaaaagaaaagaaaaaaaaatgtgtcagtgtcaacacacaactcctgttggatattcaaagataatttcaatggtgggctattccatcaatcaggaaagcaaaaccacccgagatatttcaaatggagaagaacttaatataaattttatgttccttttggagggcaatttggtaagatacatcaaagcctgaagaggccgggcatagtggctcacacctgtaatcctagcactttgtgaggccaaggcaggcggatgacttgaggtcaggagtttgagaccagcctggccaacatgatgaaactccatccctaccaaaaaaaaaaacaaacaaaaaaaaattagctgggcatggtggcgtgtgtctgtaattccagctacttgagaggctgaggtaagagaatcgcttgaacctgggaggcagaggttgcagtgagctgagatcacaccactgcactccagcctgggtgacagagaccctgtgtcaaaaaaaaaaaaaaaaaattaacagaggctgggcaatggtggcttatgcctgtaatcccagcactttgggaggctgaggtgggtggatcactcaaggccaggagttcgagaccagcctggccaacatagtgaaaacccatctctaccaaaaattagccgggtgtggtggtctgcgcctgtagtctcagctgcccaggaggctgaggtgggaaaataacttgaacctgggaggcggaggttccagtgagccgagatcacgccactgcactccagcctggcgacagagtgagactgtctcaaaaaaaaagtgagtcaatgttctggtttcagatcctataaatctcaccttttactaaagaaagtgactcagaaagcgaacaaaggtaaaaagagaaagacaatacccacctcacaagaactaaggctgtggaacatgtacaattggttttgtttttgtttgttttttggagacagagtctctgtcacccaggcgggagtgcagtggtgtgatctcggctcactacaacctccgcctcccgggttcaagcaattctcctgcctcagcctcctgagagtagctgggattacaggcgtgagccacagcacctggcccataaaattgtttttaaacagccttgactatgcattattcgagttcttggctcagttcttggtcattttgtccttgtccctagtcatgtgtttcagctgtttgtcttcactgatggacttcattacccaacaaagtggcccagcatggcagataccaagtaggtcagaaattagcatcttagccagaccaagacatccactgacttcatagcaccaccttcactttgacaagtgcagctcaacaaacattggtgaacacgtgcagtgagccaggtactgttaggagctaaaaagacaagcattgacaggccaggcacagtggcttacgcctgtaatcccagcactttgggaggccgaggcgggaggatcgggaggtcaagagttcgagacgagcctgaccaacatggtgaaaccccatctctactaaaaatacaaaaattagctgggcctggtggtgcgtgcctgtaatcccagctactcgggaggctgaggcaggagaatcacttgaacccaggaggcagaggttgcagtgagccgagataccgccactgcactccagcctgggcggcagagactccgtctcaaaaaaaaaaaaacaaaaaacaagcattgacagtacagccttggggcctgctttcttggaggctacacagtccagcacttcctgaacaccatttcctgtttatttcctgaaatacatgagcaggcattctcagcctccctcggtgctatcaggtcactcccagcttacccaggctgtcacatggtcccttgccacaatcactgcttcctgaacaccctccatcctggcattctctccccctgaggcacttccctgtttaagacaccagatctgggtgagcccttccctttgcctgttacctgcacctgaagagctgaatattcccagaagaaaattacaactgagctggcagatttcactttaatgatgataaagctcaaacggacacaatgttaccaaaggatgctactctgaatctctagtaggcttgctttgcttttccccacatcagctcacgtgcacagtcagccctctcacactccctttctgcctcatgtataatccacttaggaaagtgaagccataagacataagctccctcctccctccaccaagcagacaaacctacctccagccacacttacgccgatccctacacctaagctcctgcagcccatccccctgctttttttttccttttttttttaaagagacagggtctcactgtgttgcccaggctggagtgcaccatcacgactgattgcaactttgacctcccggcctcaagcaatcctcccacctcagcctcccatgtagctgggacaacagcaggcatgtgctaccacaccagctaatttttattttttatttttgtgtagcgacatggtctccgtatgttgcccaggctggtcttgaactcccgggctcaagtgatcctcccacctctgcctcccagtgttgagattacaaggtgtgagtgcctggctaccacctgcattttctgagattttgatattttgttgatccttctcctaaattgtcagccttctgttctggaccattaacaccatacaaacaggctctagtgtaactcatcttaatttaaaatatgtgtgtatatatgtatatatatatggactcaattagtttctgctacactcctcccgctgcactcaacattgaaaagttagtgttcctcagagctcaattttgggcttcttcacattctctccatgccttgaaataatgtgtatatgctgatccctcctcccaagtgtatagttacaggtcagattctcccccgaactccaggataaaaaaattcatctgcctactcactatctccactcaggtattacacctgaaatctattatattacaaataactttctttctttctttctttctttttagatggagttttgctcttgttgcctgggctagagcgcaatgatgtgatcttggctcaccgcaacttcctcctcccgggttcaagcaattctcctgcctcagcctctcaagtagctgggattacaggcatgtgccaccacacctgcctaattctgtatttttagtagagacggggtttctgcatgttggtcaggctggtctcgaactcccgacctcaggtgatccgcctgcctcggcctcccaaagtgctggggttacaggcgtgagccaccgcgcccagcacaaataactttctaattgctgacacccatctcaaaatctgtcacttgtcccccgggcttcctcatctctgccagtggtattgttaccgggcatcctgtgttggaatggattctttaaccaagatcaacagagctggagctctggaccagcaatctcagttcttgtgatagtgagcaaagaattgcaaactaggctgggctcacacctgtaatcccagcactttgggaggccaaggcagatggatcacgaggtcaggagatcgagaccatcctggcaaacacggtgaaaccccatctctactaaaaatacaaaaaaattagccgggcatggtggcgggcgcctgtagtcccagctactcgggaggctgaggcagattgcgccactgcactctagcccgagcgacagagcgagactccatctcaaaaaaaaaaaaaaaaggcaaactaacactgaaatgcaagcttacagcaagatttattgcaacacagtaaaacactctgagggagagcaggctcatttctgggaagtaaaatcagcccctctttacaaaaatcaaggtgcttttatggggtttgttggaggagttgaggcttgggctgtgtttgagtgacaggatgatatcatttgattggcagtttatggttatatccctgaagttaaactgcgcatgtttttacccataattcattaagaaaagcccactcagagaggcaaaaccacatgtaaattttattataacgactataatgaggatgggttttccctgggttatggcctacatggactgggcacgtgtggctttaggccatcgttatctgtgccccagtttttctttctccaggatgtgctggccccagattgtaccataaattccatccattagggtggagttaggacggtctcaggctgaacttaggtgggctagggccggtcttagtgacagccctcctgctttcttctctctccctctcccagctgctaatgtccatctaactacctaacagtattgtcgttctgtttgttcaagtcagaaacctagaagtcatcctgtttccatcctttcctccaggacctccacatccaacctaagagcaaaccccaccccaccacatttgtctccaagcccacctggactctagccacctccactgccacctgccgtgatctcaggcttcattctctgagttacactgatctccttgcttcccctaccagcccttctccaatctgtagtccccacatctgcacaactgatactgcaccaccctgttgagaaccttgaaatggggccaggggtggtggctcatgcctgtaatcccagcaatttgggaggctgaggcagggggatcacctgaggtcaggagttcgagaccagcctggccaacatggtgaaaccctgtctctactaaaaatacaaaagttagccaggtgtggtggtgggaacctgcaatcccagctacttgggaggctgaggcaggagaattgcttgaacccaggaggcagaggttgcaatgaaccaaaatcatgccattacactccagcctgggtgatagagcgagactctgtcaaaaaagaaagagaagacagagagagagagagaaagtaagagagagagagaaagaaagaaagaaaccttgaaatggcttcccacatgcttttggataatattcaaactctatgtcatcgtgtctacaggggtttcgcacaatgtgctgttgctgatctcttcagccctgtctcaggctcttattcctctcacccaccacactccaggaacctgctgttgaatgaatgaatgaatagcaggaaacaccccatggcctttgcaggtaccgtttcttcgctagaacaatgcaacaaaactttgcaaggctgactcctcatttaattttctactcaatggaaaagagtggaaggttcatttttgcaagactgactcctcatttaggtttccactcaaatgaggtttcctcagagagaagacattatctgacctccccccggtgccaagtagacccccatgaatttacctcattctggtgttatgtgtatagcatttatctctatcctgctttttgaattacttttttactgcccagctcctgcctcagaatataagctccaaggaagcagaaatgcatttattcccacatcccccagaaccttgaatggtgtctgggttgactgaatgaatggaaggaagggaatagtaggggaaggaggaaaagaggaaggaaagaagccaggcaggaagacaataaacaatcacaatcatgttgaatgctacaaagaattataggcagggctatccttgcggggaaggggaaggggaaggggtggctggcaatttggaggagggggagccaggattcctgtctatataagcaacttgagacaccccaaagtcattttctagacaccatgctggtggtccaatctcaggcaattctgcaaaagaaatagctcactagtcagctgaattggcccaccaccctaccttcctagaaccagagccagacacatagctctggaagaagcccctcagtacaagtttccccaagctcctgggagcatctggtccaccccacgtgcaggggttaggggtagagagttggagggtgcccccaacagggagaattggagctgaggacctcaaagtcctgctctaggctctgcccagggaaggtactgggccaggccaattctccctgacagtaacacagacaggcctgcatagcaccccagttacacagacacatttccacagcactgccttaacattgagctaataattagacccagagaaatcgatgcccagatctcaaagccagaaatgaaacatacattcaggagaagctttgcacaggcttctcccaaacttggagcaagtcaagataatggagacagccttacattccttgtgccaggacccgtctcaggtcaatgaaatccgggacgcgtcaaggtaacaaaggcagctgtgcgaacagatttactggatagtctaaggcagctctctggaccaaaccgttaaagagagaagatagaaataatcacctcagtaccacagtcctcattaattagaatttgggagacaggccttgatgatactggggtcctcatagattcattaaacttagaaggcatttttggctcctaaccttctagttagaacaaaattagtcacctatagacttagccgaatgcgataccacacatagccatataacccccacacacgtaagcactgagaaaattgtaatgcttcgagttggtctggtgaaactatctccgaccttctccctgtatctggttacagcaataaacttcctttcttagtttatctgcttctcgttactgagccactagaacacgcagccagacccggcctgggcttggtctgggaacagtactgccagccccaacttgtcccacgcagtagagagggactttgaaaacgttgagaagtcactccaaacagcaagggtccctgagggcttgcccaggtctgaaggtgggactgagaatacaggcctccttggaagggcttaacccagttgggaaggagaaggctctcggaacaccctgtactcacccttgtgtaactttcagcacagtggaaattgctaacctaatgcctgtgcctccctttgaatgtgaatgccactgactggtcataaccaccctccagtgaggatttactcgatgtctgttgaatatatggcaagatgcagggtgctttttaccttaaacttttatgtactcaaaacttttttcaacatcactttttccaaggcctttgtagctattttttgtttgtttgtttgtttgagagggagtcttgctctgtcgcccaggctggagtgcagtggtgcaatctcagctcactgcaacctccgcctctcaggttcaagcgattctcctgcctcaacctcccaagtaactgggattacaggtgcctaccatgatgcccggctaatttttgcatttttagtagtgacaggtcttcaccatgttggccaggctggtctagaactcctgacctcaagtgatcttcccaccttggcctcccaaagtgctgggattacaggcgtaagccaccgcgcccagcccactgtagctgtttttaagagaaaaaacatatattaaaatcattctgggttttaaaaaaattgcatagggatttgtttttagcagtttagcagtgtaggtatccagactgccccgacctccctctgaacaccagaaaggttgaataaaggttttattcaatgttattaaatgcatcaatgagctggcaagaaagttggtgaaagtggaaacccataaggtaagcaaagcaccgtagctggccttcaaccagttattaaataaaacaaacagaatagtaactgaaaaaagaaaataatagacatataaaactcagtggaacggatcaacaaaaaatggtatacaataggatactattcagccacaaaaaggaatgaagtagtgatccatgctacagcgtgaaggaaccttgaaaatatcatgctcagtgaaaggagccagacacaaaaggttacatattgcctgactccatttatacgaaatggaatcgataattatacagacagaaagcggattcgtagttgccagagcctgagagaagtggggaacaattgctgaatgggtgtgcggtttcatttaagggtaacgaaatgttttggaactatttaaagtggttgcacaacattgtgagtgtattaccatggaactgttcacttcagaatggttagttttaagttatgtgaattccccttcaacaataaaaaaaaaaaaagaaaaaggaacaaatagccaccaaaaattttttataaagaaaagaaagaaaacccatcagtgcaatccaccatgttaataaagaagaaaaattatgagaaaccaaaaaataaattacactgataacttttaaatccattcaataggaagagatggcagtttccttaattagataaaggtatctacaaaaactggtagtcaacgttattgttataggtgaaaaatttctcattcagattaagaaaaagaataatactctgaggtgggaggatctcttgagcccaagagttcgagaccagcctgagcaacacagcaagacccaccctccatctctcaaaaaaaaaaaaaagagaatgatgtatactctcaccacttctttacagcattatccagcctgtgagtcaagcaagaaaaggaagtaaaagctacgtggattggaaatgaggatataaaactgctataattcagatgatttgattgaaaatacaggaaatctaaaagaatctttagaaaatgtatgggaattaataattaggtaaagttgctagatacaaaaacagaaaataaacattttaaagtaaatctctactaaatgtctatgctgccataacaaatatcacaaactcagtggcttaaagcaacagaagtttagtatcttacagctgtgcagctgagaagttctagatagctctcacagagctacagtcaagatgccaacagggctgcattcttttctaaggctctaggagagaatgttctctgctcatggcttggtagaattcagttccctctgattgcaggactgttttcttgctctctgtgaactgaaggctgttcccagcttctagaggccactgcatttcttggcttgtggctccttccagcttcagagccagcaaggccattgaatccttctcaggtggcacctcttaggcccattcttctgcctgtctttcacttttaagggttcatggaagtagactgggcccacctggataacccaggctagtctccctatattaatctctctgattag

SEQ ID NO: 649 - DNA, 1729 bp, Homo sapiens
gaaaggtggcggtgctttcggagggttagaacctgcaaatgaagaacacaatgtggaaacagctgaagattccgaaataagatacttatctgcagattcaggagatgccgatgattcagatgcggatttgggttctgccgtgaaacagcttcaggagttcattcctaacatcaaggacagggccaccagcacaatcaagcggatgtaccgggacgacttggaacggtttaaggaatttaaagcacaaggtgtcgctattaaatttggcaagttttctgtaaaggaaaataagcagttagagaaaaatgtggaagactttctagccctgacaggcattgagagtgcagacaagctcctgtacacggacagatatcctgaggaaaaatctgtgatcaccaacttaaaaaggagatactcgtttagattacacattggtaggaacattgcccggccctggaaacttatatactatcgagcaaagaagatgttcgatgtcaacaattacaaaggcaggtatagcgaaggagatactgagaagttaaagatgtaccattctctccttgggaatgactggaagacgattggtgagatggtggcccgaagtagcctctccgtggccctcaagttctcacagatcagcagtcaaagaaatcgtggtgcttggagtaagtctgaaacccggaaactaatcaaggctgtcgaagaagtgattctgaagaagatgtctccccaggagttaaaagaggtggattccaaactccaagaaaatcctgaaagttgcctatcaattgttcgggaaaaactctacaagggcatatcttgggtagaagtagaagctaaagtgcaaaccagaaattggatgcagtgtaaaagtaagtggacagaaattctaaccaagaggatgactaatggtcggcgtatatactatggcatgaatgccctgcgggccaaggtcagccttattgaaaggttgtatgaaataaatgtggaagatactaatgaaatagactgggaagatcttgctagtgccataggtgatgttcctccatcttacgttcaaactaaattttctaggctgaaagctgtctatgttccattttggcagaaaaagacttttccagagatcatcgactacctttatgagacgactctacctttgctgaaggaaaagttagaaaaaatgatggagaaaaaaggcactaaaatccagactcctgcagcacccaagcaagttttcccatttcgagacatcttttattatgaagacgatagtgaaggagaggacatagaaaaagaaagcgaaggccaggcgccatgcatggctcacgcctgtaattccagtactttgggaggccaaggccggtggatcatctgaggtcaggagttcgagaccggcctgaccaacatggtgaagacctgtcactattaaaaatgcgaaaattagccgggtgtggtagtgcacacctgtaatttcaactacttgggaggctgaggcaggagaattgcttgaacccaggaggtggaggttgcagtgagccaagatcgcaccaccgcatgagagagagagattactatttcttgtccctttttctcagtttgattatatttatatacatatgtcagtaaatctgttttcagtattgatgtttaataaagaatgtacaatggccagagttctactctttcctctggagcattaaaatatattgccattcctattaaaacgtat

SEQ ID NO: 650 - protein, 388 aa, Homo sapiens
MYRDDLERFKEFKAQGVAIKFGKFSVKENKQLEKNVEDFLALTGIESADKLLYTDRYPEEKSVITNLKRRYSFRLHIGRNIARPWKLIYYRAKKMFDVNNYKGRYSEGDTEKLKMYHSLLGNDWKTIGEMVARSSLSVKFSQISSQRNRGAWSKSETRKLIKAVEEVILKKMSPQELKEVDSKLQENPESCLSIVREKLYKGISWVEVEAKVQTRNWMQCKSKWTEILTKRMTNGRRIYYGMNALRAKVSLIERLYEINVEDTNEIDWEDLASAIGDVPPSYVQTKFSRLKAVYVPFWQKKTFPEIIDYLYETTLPLLKEKLEKMMEKKGTKIQTPAAPKQVFPFRDIFYYEDDSEGEDIEKESEGQAPCMAHACNSSTLGGQGRWII

SEQ ID NO: 651 - DNA, 3126 bp, Homo sapiens
ttccgggttgggagaaaggtggcggtgctttcggagggaataaaatggaaggagaatcaagcagatttgaaatccacactccagtttctgacaagaaaaagaaaaagtgttctatacataaggaaagacctcagaaacattcccacgaaattttcagagactcctccctggtgaatgaacagtctcaaataactaggaggaaaaagaggaaaaaagatttccagcatctcatttcttctcctttgaaaaaatccagaatctgtgatgagactgcaaatgccacttccacactcaaaaagagaaaaaagagaagatatagtgctttggaggtggacgaggaagcaggtgttacagttgtccttgtggataaagaaaatattaacaacacaccaaagcattttagaaaggatgttgatgttgtttgtgttgatatgagcatagaacagaagttaccaagaaagcctaaaacagacaaatttcaggtacttgctaagtcacatgcacataaatcagaagccctgcacagtaaagttagggagaaaaagaataaaaagcatcagaggaaagctgcatcctgggagagccagcgggcaagggacaccctgcctcagtcagaatcccaccaggaggagtcctggctttctgtgggtccagggggtgaaattacagaactaccagcatctgctcataaaaacaagtctaagaaaaaaaagaaaaagtccagtaaccgggaatatgagacactggccatgcctgaaggatcgcaagcaggcagagaggccgggactgatatgcaggaatcccagcctactgtgggcttggatgatgaaactccacaactactaggacctactcacaaaaaaaagtctaagaaaaaaaagaagaaaaagtccaatcaccaggaatttgaggcattggccatgcctgaaggatcacaagtgggcagtgaggttggggctgatatgcaggaatcccggcctgctgtgggcctgcatggtgaaactgcaggaataccagcacctgcttataaaaacaagtctaagaaaaaaaagaaaaagtccaatcaccaggaatttgaggcagtggccatgcctgagagcctcgagagtgcataccctgaaggatcacaggtgggcagtgaggttgggactgtggaaggcagtacagctcttaaagggttcaaggaatccaacagtacaaagaagaagtctaagaaaaggaagcttacgtctgtcaaaagggcacgagtgtctggtgatgatttttcagtgcccagtaagaactctgagagcacactctttgattcagtagaaggtgatggcgccatgatggaagaaggtgtgaaatctaggccccgacaaaagaaaacccaggcctgtttggcaagcaagcacgtgcaagaggcgccaaggttagaacctgcaaatgaagaacacaatgtggaaacagctgaagattccgaaataagatacttatctgcagattcaggagatgccgatgattcagatgcggatttgggttctgccgtgaaacagcttcaggagttcattcctaacatcaaggacagggccaccagcacaatcaagcggatgtaccgggacgacttggaacggtttaaggaatttaaagcacaaggtgtcgctattaaatttggcaagttttctgtaaaggaaaataagcagttagagaaaaatgtggaagactttctagccctgacaggcattgagagtgcagacaagctcctgtacacggacagatatcctgaggaaaaatctgtgatcaccaacttaaaaaggagatactcgtttagattacacattggtaggaacattgcccggccctggaaacttatatactatcgagcaaagaagatgttcgatgtcaacaattacaaaggcaggtatagcgaaggagatactgagaagttaaagatgtaccattctctccttgggaatgactggaagacgattggtgagatggtggcccgaagtagcctctccgtggccctcaagttctcacagatcagcagtcaaagaaatcgtggtgcttggagtaagtctgaaacccggaaactaatcaaggctgtcgaagaagtgattctgaagaagatgtctccccaggagttaaaagaggtggattccaaactccaagaaaatcctgaaagttgcctatcaattgttcgggaaaaactctacaagggcatatcttgggtagaagtagaagctaaagtgcaaaccagaaattggatgcagtgtaaaagtaagtggacagaaattctaaccaagaggatgactaatggtcggcgtatatactatggcatgaatgccctgcgggccaaggtcagccttattgaaaggttgtatgaaataaatgtggaagatactaatgaaatagactgggaagatcttgctagtgccataggtgatgttcctccatcttacgttcaaactaaattttctaggctgaaagctgtctatgttccattttggcagaaaaagacttttccagagatcatcgactacctttatgagacgactctacctttgctgaaggaaaagttagaaaaaatgatggagaaaaaaggcactaaaatccagactcctgcagcacccaagcaagttttcccatttcgagacatcttttattatgaagacgatagtgaaggagaggacatagaaaaagaaagcgaaggccaggcgccatgcatggctcacgcctgtaattccagtactttgggaggccaaggccggtggatcatctgaggtcaggagttcgagaccggcctgaccaacatggtgaagacctgtcactattaaaaatgcgaaaattagccgggtgtggtagtgcacacctgtaatttcaactacttgggaggctgaggcaggagaattgcttgaacccaggaggtggaggttgcagtgagccaagatcgcaccaccgcatgagagagagagattactatttcttgtccctttttctcagtttgattatatttatatacatatgtcagtaaatctgttttcagtattgatgtttaataaagaatgtacaatggccagagttctactctttcctctggagcattaaaatatattgccattcctattaaaacgtatttgaatgtga

SEQ ID NO: 652 - protein, 901 aa, Homo sapiens
MEGESSRFEIHTPVSDKKKKKCSIHKERPQKHSHEIFRDSSLVNEQSQITRRKKRKKDFQHLISSPLKKSRICDETANATSTLKKRKKRRYSALEVDEEAGVTVVLVDKENINNTPKHFRKDVDVVCVDMSIEQKLPRKPKTDKFQVLAKSHAHKSEALHSKVREKKNKKHQRKAASWESQRARDTLPQSESHQEESWLSVGPGGEITELPASAHKNKSKKKKKKSSNREYETLAMPEGSQAGREAGTDMQESQPTVGLDDETPQLLGPTHKKKSKKKKKKKSNHQEFEAMPEGSQVGSEVGADMQESRPAVGLHGETAGIPAPAYKNKSKKKKKKSNHQEFEAVAMPESLESAYPEGSQVGSEVGTVEGSTALKGFKESNSTKKKSKKRKLTSVKRARVSGDDFSVPSKNSESTLFDSVEGDGAMMEEGVKSRPRQKKTQACLASKHVQEAPRLEPANEEHNVETAEDSEIRYLSADSGDADDSDADLGSAVKQLQEFIPNIKDRATSTIKRMYRDDLERFKEFKAQGVAIKFGKFSVKENKQLEKNVEDFLALTGIESADKLLYTDRYPEEKSVITNLKRRYSFRLHIGRNIARPWKLIYYRAKKMFDVNNYKGRYSEGDTEKLKMYHSLLGNDWKTIGEMVARSSLSVKFSQISSQRNRGAWSKSETRKLIKAVEEVILKKMSPQELKEVDSKLQENPESCLSIVREKLYKGISWVEVEAKVQTRNWMQCKSKWTEILTKRMTNGRRIYYGMNALRAKVSLIERLYEINVEDTNEIDWEDLASAIGDVPPSYVQTKFSRLKAVYVPFWQKKTFPEIIDYLYETTLPLLKEKLEKMMEKKGTKIQTPAAPKQVFPFRDIFYYEDDSEGEDIEKESEGQAPCMAHACNSSTLGGQGRWII
